United States Patent Application Publication US 2018/0118836 A1 - sequence listing, part 3

SEQ ID NO: 33543 - protein, 114 aa, Artificial Sequence
  Description of Artificial Sequence: Synthetic polypeptide
  VL of XENP023630
DVLMTQSPDSLAVSLGERATINCKSSQSIVHSNGNTYLEWYQQKPGQSPKLLIYKVSNRFSGVPDRFSGSGSGTDFTLTISSAQAEDVAVYYCFQGSHVPNTFGGGTKVEIKGS

SEQ ID NO: 33544 - protein, 5 aa, Artificial Sequence
  Description of Artificial Sequence: Synthetic peptide
  XENP023630 vhCDR1
HYGMN

SEQ ID NO: 33545 - protein, 17 aa, Artificial Sequence
  Description of Artificial Sequence: Synthetic peptide
  XENP023630 vhCDR2
WINTYTGEPTYADGFTG

SEQ ID NO: 33546 - protein, 8 aa, Artificial Sequence
  Description of Artificial Sequence: Synthetic peptide
  XENP023630 vhCDR3
DYYGSSPY

SEQ ID NO: 33547 - protein, 16 aa, Artificial Sequence
  Description of Artificial Sequence: Synthetic peptide
  XENP023630 vlCDR1
KSSQSIVHSNGNTYLE

SEQ ID NO: 33548 - protein, 7 aa, Artificial Sequence
  Description of Artificial Sequence: Synthetic peptide
  XENP023630 vlCDR2
KVSNRFS

SEQ ID NO: 33549 - protein, 9 aa, Artificial Sequence
  Description of Artificial Sequence: Synthetic peptide
  XENP023630 vlCDR3
FQGSHVPNT

SEQ ID NO: 33550 - protein, 251 aa, Artificial Sequence
  Description of Artificial Sequence: Synthetic polypeptide
  XENP023631 1C11_H3_L3.65_scFv
QIQLVQSGSELKKPGASVKVSCKASGYTFTHYGMNWVRQAPGQGLEWMGWINTYTGEPTYADGFTGRFVFSLDTSVSTAYLQISSLKAEDTAVYFCARDYYGSSPYWGQGTLVTVSSGKPGSGKPGSGKPGSGKPGSDVLMTQSPDSLAVSLGERATINCKSSQSIVHSNGNTYLEWYQQKPGQSPKLLIYKVSNRFSGVPDRFSGSGSGTDFTLTISSLEAEDVAVYYCFQGSHVPNTFGGGTKVEIKGS

SEQ ID NO: 33551 - protein, 117 aa, Artificial Sequence; identical to SEQ ID NO: 33034
  Description of Artificial Sequence: Synthetic polypeptide
  VH of XENP023631

SEQ ID NO: 33552 - protein, 114 aa, Artificial Sequence
  Description of Artificial Sequence: Synthetic polypeptide
  VL of XENP023631
DVLMTQSPDSLAVSLGERATINCKSSQSIVHSNGNTYLEWYQQKPGQSPKLLIYKVSNRFSGVPDRFSGSGSGTDFTLTISSLEAEDVAVYYCFQGSHVPNTFGGGTKVEIKGS

SEQ ID NO: 33553 - protein, 5 aa, Artificial Sequence
  Description of Artificial Sequence: Synthetic peptide
  XENP023631 vhCDR1
HYGMN

SEQ ID NO: 33554 - protein, 17 aa, Artificial Sequence
  Description of Artificial Sequence: Synthetic peptide
  XENP023631 vhCDR2
WINTYTGEPTYADGFTG

SEQ ID NO: 33555 - protein, 8 aa, Artificial Sequence
  Description of Artificial Sequence: Synthetic peptide
  XENP023631 vhCDR3
DYYGSSPY

SEQ ID NO: 33556 - protein, 16 aa, Artificial Sequence
  Description of Artificial Sequence: Synthetic peptide
  XENP023631 vlCDR1
KSSQSIVHSNGNTYLE

SEQ ID NO: 33557 - protein, 7 aa, Artificial Sequence
  Description of Artificial Sequence: Synthetic peptide
  XENP023631 vlCDR2
KVSNRFS

SEQ ID NO: 33558 - protein, 9 aa, Artificial Sequence
  Description of Artificial Sequence: Synthetic peptide
  XENP023631 vlCDR3
FQGSHVPNT

SEQ ID NO: 33559 - protein, 251 aa, Artificial Sequence
  Description of Artificial Sequence: Synthetic polypeptide
  XENP023632 1C11_H3_L3.66_scFv
QIQLVQSGSELKKPGASVKVSCKASGYTFTHYGMNWVRQAPGQGLEWMGWINTYTGEPTYADGFTGRFVFSLDTSVSTAYLQISSLKAEDTAVYFCARDYYGSSPYWGQGTLVTVSSGKPGSGKPGSGKPGSGKPGSDVLMTQSPDSLAVSLGERATINCKSSQSIVHSNGNTYLEWYQQKPGQSPKLLIYKVSNRFSGVPDRFSGSGSGTDFTLTISSLQPEDVAVYYCFQGSHVPNTFGGGTKVEIKGS

SEQ ID NO: 33560 - protein, 117 aa, Artificial Sequence; identical to SEQ ID NO: 33034
  Description of Artificial Sequence: Synthetic polypeptide
  VH of XENP023632

SEQ ID NO: 33561 - protein, 114 aa, Artificial Sequence
  Description of Artificial Sequence: Synthetic polypeptide
  VL of XENP023632
DVLMTQSPDSLAVSLGERATINCKSSQSIVHSNGNTYLEWYQQKPGQSPKLLIYKVSNRFSGVPDRFSGSGSGTDFTLTISSLQPEDVAVYYCFQGSHVPNTFGGGTKVEIKGS

SEQ ID NO: 33562 - protein, 5 aa, Artificial Sequence
  Description of Artificial Sequence: Synthetic peptide
  XENP023632 vhCDR1
HYGMN

SEQ ID NO: 33563 - protein, 17 aa, Artificial Sequence
  Description of Artificial Sequence: Synthetic peptide
  XENP023632 vhCDR2
WINTYTGEPTYADGFTG

SEQ ID NO: 33564 - protein, 8 aa, Artificial Sequence
  Description of Artificial Sequence: Synthetic peptide
  XENP023632 vhCDR3
DYYGSSPY

SEQ ID NO: 33565 - protein, 16 aa, Artificial Sequence
  Description of Artificial Sequence: Synthetic peptide
  XENP023632 vlCDR1
KSSQSIVHSNGNTYLE

SEQ ID NO: 33566 - protein, 7 aa, Artificial Sequence
  Description of Artificial Sequence: Synthetic peptide
  XENP023632 vlCDR2
KVSNRFS

SEQ ID NO: 33567 - protein, 9 aa, Artificial Sequence
  Description of Artificial Sequence: Synthetic peptide
  XENP023632 vlCDR3
FQGSHVPNT

SEQ ID NO: 33568 - protein, 251 aa, Artificial Sequence
  Description of Artificial Sequence: Synthetic polypeptide
  XENP023633 1C11_H3_L3.69_scFv
QIQLVQSGSELKKPGASVKVSCKASGYTFTHYGMNWVRQAPGQGLEWMGWINTYTGEPTYADGFTGRFVFSLDTSVSTAYLQISSLKAEDTAVYFCARDYYGSSPYWGQGTLVTVSSGKPGSGKPGSGKPGSGKPGSDVLMTQSPDSLAVSLGERATINCKSSQSIVHSNGNTYLEWYQQKPGQSPKLLIYKVSNRFSGVPDRFSGSGSGTDFTLTISSLQAEDAAVYYCFQGSHVPNTFGGGTKVEIKGS

SEQ ID NO: 33569 - protein, 117 aa, Artificial Sequence; identical to SEQ ID NO: 33034
  Description of Artificial Sequence: Synthetic polypeptide
  VH of XENP023633

SEQ ID NO: 33570 - protein, 114 aa, Artificial Sequence
  Description of Artificial Sequence: Synthetic polypeptide
  VL of XENP023633
DVLMTQSPDSLAVSLGERATINCKSSQSIVHSNGNTYLEWYQQKPGQSPKLLIYKVSNRFSGVPDRFSGSGSGTDFTLTISSLQAEDAAVYYCFQGSHVPNTFGGGTKVEIKGS

SEQ ID NO: 33571 - protein, 5 aa, Artificial Sequence
  Description of Artificial Sequence: Synthetic peptide
  XENP023633 vhCDR1
HYGMN

SEQ ID NO: 33572 - protein, 17 aa, Artificial Sequence
  Description of Artificial Sequence: Synthetic peptide
  XENP023633 vhCDR2
WINTYTGEPTYADGFTG

SEQ ID NO: 33573 - protein, 8 aa, Artificial Sequence
  Description of Artificial Sequence: Synthetic peptide
  XENP023633 vhCDR3
DYYGSSPY

SEQ ID NO: 33574 - protein, 16 aa, Artificial Sequence
  Description of Artificial Sequence: Synthetic peptide
  XENP023633 vlCDR1
KSSQSIVHSNGNTYLE

SEQ ID NO: 33575 - protein, 7 aa, Artificial Sequence
  Description of Artificial Sequence: Synthetic peptide
  XENP023633 vlCDR2
KVSNRFS

SEQ ID NO: 33576 - protein, 9 aa, Artificial Sequence
  Description of Artificial Sequence: Synthetic peptide
  XENP023633 vlCDR3
FQGSHVPNT

SEQ ID NO: 33577 - protein, 251 aa, Artificial Sequence
  Description of Artificial Sequence: Synthetic polypeptide
  XENP023634 1C11_H3_L3.70_scFv
QIQLVQSGSELKKPGASVKVSCKASGYTFTHYGMNWVRQAPGQGLEWMGWINTYTGEPTYADGFTGRFVFSLDTSVSTAYLQISSLKAEDTAVYFCARDYYGSSPYWGQGTLVTVSSGKPGSGKPGSGKPGSGKPGSDVLMTQSPDSLAVSLGERATINCKSSQSIVHSNGNTYLEWYQQKPGQSPKLLIYKVSNRFSGVPDRFSGSGSGTDFTLTISSLQAEDFAVYYCFQGSHVPNTFGGGTKVEIKGS

SEQ ID NO: 33578 - protein, 117 aa, Artificial Sequence; identical to SEQ ID NO: 33034
  Description of Artificial Sequence: Synthetic polypeptide
  VH of XENP023634

SEQ ID NO: 33579 - protein, 114 aa, Artificial Sequence
  Description of Artificial Sequence: Synthetic polypeptide
  VL of XENP023634
DVLMTQSPDSLAVSLGERATINCKSSQSIVHSNGNTYLEWYQQKPGQSPKLLIYKVSNRFSGVPDRFSGSGSGTDFTLTISSLQAEDFAVYYCFQGSHVPNTFGGGTKVEIKGS

SEQ ID NO: 33580 - protein, 5 aa, Artificial Sequence
  Description of Artificial Sequence: Synthetic peptide
  XENP023634 vhCDR1
HYGMN

SEQ ID NO: 33581 - protein, 17 aa, Artificial Sequence
  Description of Artificial Sequence: Synthetic peptide
  XENP023634 vhCDR2
WINTYTGEPTYADGFTG

SEQ ID NO: 33582 - protein, 8 aa, Artificial Sequence
  Description of Artificial Sequence: Synthetic peptide
  XENP023634 vhCDR3
DYYGSSPY

SEQ ID NO: 33583 - protein, 16 aa, Artificial Sequence
  Description of Artificial Sequence: Synthetic peptide
  XENP023634 vlCDR1
KSSQSIVHSNGNTYLE

SEQ ID NO: 33584 - protein, 7 aa, Artificial Sequence
  Description of Artificial Sequence: Synthetic peptide
  XENP023634 vlCDR2
KVSNRFS

SEQ ID NO: 33585 - protein, 9 aa, Artificial Sequence
  Description of Artificial Sequence: Synthetic peptide
  XENP023634 vlCDR3
FQGSHVPNT

SEQ ID NO: 33586 - protein, 251 aa, Artificial Sequence
  Description of Artificial Sequence: Synthetic polypeptide
  XENP023635 1C11_H3_L3.72_scFv
QIQLVQSGSELKKPGASVKVSCKASGYTFTHYGMNWVRQAPGQGLEWMGWINTYTGEPTYADGFTGRFVFSLDTSVSTAYLQISSLKAEDTAVYFCARDYYGSSPYWGQGTLVTVSSGKPGSGKPGSGKPGSGKPGSDVLMTQSPDSLAVSLGERATINCKSSQSIVHSNGNTYLEWYQQKPGQSPKLLIYKVSNRFSGVPDRFSGSGSGTDFTLTISSLQAEDVADYYCFQGSHVPNTFGGGTKVEIKGS

SEQ ID NO: 33587 - protein, 117 aa, Artificial Sequence; identical to SEQ ID NO: 33034
  Description of Artificial Sequence: Synthetic polypeptide
  VH of XENP023635

SEQ ID NO: 33588 - protein, 114 aa, Artificial Sequence
  Description of Artificial Sequence: Synthetic polypeptide
  VL of XENP023635
DVLMTQSPDSLAVSLGERATINCKSSQSIVHSNGNTYLEWYQQKPGQSPKLLIYKVSNRFSGVPDRFSGSGSGTDFTLTISSLQAEDVADYYCFQGSHVPNTFGGGTKVEIKGS

SEQ ID NO: 33589 - protein, 5 aa, Artificial Sequence
  Description of Artificial Sequence: Synthetic peptide
  XENP023635 vhCDR1
HYGMN

SEQ ID NO: 33590 - protein, 17 aa, Artificial Sequence
  Description of Artificial Sequence: Synthetic peptide
  XENP023635 vhCDR2
WINTYTGEPTYADGFTG

SEQ ID NO: 33591 - protein, 8 aa, Artificial Sequence
  Description of Artificial Sequence: Synthetic peptide
  XENP023635 vhCDR3
DYYGSSPY

SEQ ID NO: 33592 - protein, 16 aa, Artificial Sequence
  Description of Artificial Sequence: Synthetic peptide
  XENP023635 vlCDR1
KSSQSIVHSNGNTYLE

SEQ ID NO: 33593 - protein, 7 aa, Artificial Sequence
  Description of Artificial Sequence: Synthetic peptide
  XENP023635 vlCDR2
KVSNRFS

SEQ ID NO: 33594 - protein, 9 aa, Artificial Sequence
  Description of Artificial Sequence: Synthetic peptide
  XENP023635 vlCDR3
FQGSHVPNT

SEQ ID NO: 33595 - protein, 251 aa, Artificial Sequence
  Description of Artificial Sequence: Synthetic polypeptide
  XENP023636 1C11_H3_L3.73_scFv
QIQLVQSGSELKKPGASVKVSCKASGYTFTHYGMNWVRQAPGQGLEWMGWINTYTGEPTYADGFTGRFVFSLDTSVSTAYLQISSLKAEDTAVYFCARDYYGSSPYWGQGTLVTVSSGKPGSGKPGSGKPGSGKPGSDVLMTQSPDSLAVSLGERATINCKSSQSIVHSNGNTYLEWYQQKPGQSPKLLIYKVSNRFSGVPDRFSGSGSGTDFTLTISSLQAEDVATYYCFQGSHVPNTFGGGTKVEIKGS

SEQ ID NO: 33596 - protein, 117 aa, Artificial Sequence; identical to SEQ ID NO: 33034
  Description of Artificial Sequence: Synthetic polypeptide
  VH of XENP023636

SEQ ID NO: 33597 - protein, 114 aa, Artificial Sequence
  Description of Artificial Sequence: Synthetic polypeptide
  VL of XENP023636
DVLMTQSPDSLAVSLGERATINCKSSQSIVHSNGNTYLEWYQQKPGQSPKLLIYKVSNRFSGVPDRFSGSGSGTDFTLTISSLQAEDVATYYCFQGSHVPNTFGGGTKVEIKGS

SEQ ID NO: 33598 - protein, 5 aa, Artificial Sequence
  Description of Artificial Sequence: Synthetic peptide
  XENP023636 vhCDR1
HYGMN

SEQ ID NO: 33599 - protein, 17 aa, Artificial Sequence
  Description of Artificial Sequence: Synthetic peptide
  XENP023636 vhCDR2
WINTYTGEPTYADGFTG

SEQ ID NO: 33600 - protein, 8 aa, Artificial Sequence
  Description of Artificial Sequence: Synthetic peptide
  XENP023636 vhCDR3
DYYGSSPY

SEQ ID NO: 33601 - protein, 16 aa, Artificial Sequence
  Description of Artificial Sequence: Synthetic peptide
  XENP023636 vlCDR1
KSSQSIVHSNGNTYLE

SEQ ID NO: 33602 - protein, 7 aa, Artificial Sequence
  Description of Artificial Sequence: Synthetic peptide
  XENP023636 vlCDR2
KVSNRFS

SEQ ID NO: 33603 - protein, 9 aa, Artificial Sequence
  Description of Artificial Sequence: Synthetic peptide
  XENP023636 vlCDR3
FQGSHVPNT

SEQ ID NO: 33604 - protein, 251 aa, Artificial Sequence
  Description of Artificial Sequence: Synthetic polypeptide
  XENP023637 1C11_H3_L3.75_scFv
QIQLVQSGSELKKPGASVKVSCKASGYTFTHYGMNWVRQAPGQGLEWMGWINTYTGEPTYADGFTGRFVFSLDTSVSTAYLQISSLKAEDTAVYFCARDYYGSSPYWGQGTLVTVSSGKPGSGKPGSGKPGSGKPGSDVLMTQSPDSLAVSLGERATINCKSSQSIVHSNGNTYLEWYQQKPGQSPKLLIYKVSNRFSGVPDRFSGSGSGTDFTLTISSLQAEDVAVYYCLQGSHVPNTFGGGTKVEIKGS

SEQ ID NO: 33605 - protein, 117 aa, Artificial Sequence; identical to SEQ ID NO: 33034
  Description of Artificial Sequence: Synthetic polypeptide
  VH of XENP023637

SEQ ID NO: 33606 - protein, 114 aa, Artificial Sequence
  Description of Artificial Sequence: Synthetic polypeptide
  VL of XENP023637
DVLMTQSPDSLAVSLGERATINCKSSQSIVHSNGNTYLEWYQQKPGQSPKLLIYKVSNRFSGVPDRFSGSGSGTDFTLTISSLQAEDVAVYYCLQGSHVPNTFGGGTKVEIKGS

SEQ ID NO: 33607 - protein, 5 aa, Artificial Sequence
  Description of Artificial Sequence: Synthetic peptide
  XENP023637 vhCDR1
HYGMN

SEQ ID NO: 33608 - protein, 17 aa, Artificial Sequence
  Description of Artificial Sequence: Synthetic peptide
  XENP023637 vhCDR2
WINTYTGEPTYADGFTG

SEQ ID NO: 33609 - protein, 8 aa, Artificial Sequence
  Description of Artificial Sequence: Synthetic peptide
  XENP023637 vhCDR3
DYYGSSPY

SEQ ID NO: 33610 - protein, 16 aa, Artificial Sequence
  Description of Artificial Sequence: Synthetic peptide
  XENP023637 vlCDR1
KSSQSIVHSNGNTYLE

SEQ ID NO: 33611 - protein, 7 aa, Artificial Sequence
  Description of Artificial Sequence: Synthetic peptide
  XENP023637 vlCDR2
KVSNRFS

SEQ ID NO: 33612 - protein, 9 aa, Artificial Sequence
  Description of Artificial Sequence: Synthetic peptide
  XENP023637 vlCDR3
LQGSHVPNT

SEQ ID NO: 33613 - protein, 251 aa, Artificial Sequence
  Description of Artificial Sequence: Synthetic polypeptide
  XENP023638 1C11_H3_L3.78_scFv
QIQLVQSGSELKKPGASVKVSCKASGYTFTHYGMNWVRQAPGQGLEWMGWINTYTGEPTYADGFTGRFVFSLDTSVSTAYLQISSLKAEDTAVYFCARDYYGSSPYWGQGTLVTVSSGKPGSGKPGSGKPGSGKPGSDVLMTQSPDSLAVSLGERATINCKSSQSIVHSNGNTYLEWYQQKPGQSPKLLIYKVSNRFSGVPDRFSGSGSGTDFTLTISSLQAEDVAVYYCFQGSHVGNTFGGGTKVEIKGS

SEQ ID NO: 33614 - protein, 117 aa, Artificial Sequence; identical to SEQ ID NO: 33034
  Description of Artificial Sequence: Synthetic polypeptide
  VH of XENP023638

SEQ ID NO: 33615 - protein, 114 aa, Artificial Sequence
  Description of Artificial Sequence: Synthetic polypeptide
  VL of XENP023638
DVLMTQSPDSLAVSLGERATINCKSSQSIVHSNGNTYLEWYQQKPGQSPKLLIYKVSNRFSGVPDRFSGSGSGTDFTLTISSLQAEDVAVYYCFQGSHVGNTFGGGTKVEIKGS

SEQ ID NO: 33616 - protein, 5 aa, Artificial Sequence
  Description of Artificial Sequence: Synthetic peptide
  XENP023638 vhCDR1
HYGMN

SEQ ID NO: 33617 - protein, 17 aa, Artificial Sequence
  Description of Artificial Sequence: Synthetic peptide
  XENP023638 vhCDR2
WINTYTGEPTYADGFTG

SEQ ID NO: 33618 - protein, 8 aa, Artificial Sequence
  Description of Artificial Sequence: Synthetic peptide
  XENP023638 vhCDR3
DYYGSSPY

SEQ ID NO: 33619 - protein, 16 aa, Artificial Sequence
  Description of Artificial Sequence: Synthetic peptide
  XENP023638 vlCDR1
KSSQSIVHSNGNTYLE

SEQ ID NO: 33620 - protein, 7 aa, Artificial Sequence
  Description of Artificial Sequence: Synthetic peptide
  XENP023638 vlCDR2
KVSNRFS

SEQ ID NO: 33621 - protein, 9 aa, Artificial Sequence
  Description of Artificial Sequence: Synthetic peptide
  XENP023638 vlCDR3
FQGSHVGNT

SEQ ID NO: 33622 - protein, 251 aa, Artificial Sequence
  Description of Artificial Sequence: Synthetic polypeptide
  XENP023639 1C11_H3_L3.79_scFv
QIQLVQSGSELKKPGASVKVSCKASGYTFTHYGMNWVRQAPGQGLEWMGWINTYTGEPTYADGFTGRFVFSLDTSVSTAYLQISSLKAEDTAVYFCARDYYGSSPYWGQGTLVTVSSGKPGSGKPGSGKPGSGKPGSDVLMTQSPDSLAVSLGERATINCKSSQSIVHSNGNTYLEWYQQKPGQSPKLLIYKVSNRFSGVPDRFSGSGSGTDFTLTISSLQAEDVAVYYCFQGSHVHNTFGGGTKVEIKGS

SEQ ID NO: 33623 - protein, 117 aa, Artificial Sequence; identical to SEQ ID NO: 33034
  Description of Artificial Sequence: Synthetic polypeptide
  VH of XENP023639

SEQ ID NO: 33624 - protein, 114 aa, Artificial Sequence
  Description of Artificial Sequence: Synthetic polypeptide
  VL of XENP023639
DVLMTQSPDSLAVSLGERATINCKSSQSIVHSNGNTYLEWYQQKPGQSPKLLIYKVSNRFSGVPDRFSGSGSGTDFTLTISSLQAEDVAVYYCFQGSHVHNTFGGGTKVEIKGS

SEQ ID NO: 33625 - protein, 5 aa, Artificial Sequence
  Description of Artificial Sequence: Synthetic peptide
  XENP023639 vhCDR1
HYGMN

SEQ ID NO: 33626 - protein, 17 aa, Artificial Sequence
  Description of Artificial Sequence: Synthetic peptide
  XENP023639 vhCDR2
WINTYTGEPTYADGFTG

SEQ ID NO: 33627 - protein, 8 aa, Artificial Sequence
  Description of Artificial Sequence: Synthetic peptide
  XENP023639 vhCDR3
DYYGSSPY

SEQ ID NO: 33628 - protein, 16 aa, Artificial Sequence
  Description of Artificial Sequence: Synthetic peptide
  XENP023639 vlCDR1
KSSQSIVHSNGNTYLE

SEQ ID NO: 33629 - protein, 7 aa, Artificial Sequence
  Description of Artificial Sequence: Synthetic peptide
  XENP023639 vlCDR2
KVSNRFS

SEQ ID NO: 33630 - protein, 9 aa, Artificial Sequence
  Description of Artificial Sequence: Synthetic peptide
  XENP023639 vlCDR3
FQGSHVHNT

SEQ ID NO: 33631 - protein, 251 aa, Artificial Sequence
  Description of Artificial Sequence: Synthetic polypeptide
  XENP023640 1C11_H3_L3.81_scFv
QIQLVQSGSELKKPGASVKVSCKASGYTFTHYGMNWVRQAPGQGLEWMGWINTYTGEPTYADGFTGRFVFSLDTSVSTAYLQISSLKAEDTAVYFCARDYYGSSPYWGQGTLVTVSSGKPGSGKPGSGKPGSGKPGSDVLMTQSPDSLAVSLGERATINCKSSQSIVHSNGNTYLEWYQQKPGQSPKLLIYKVSNRFSGVPDRFSGSGSGTDFTLTISSLQAEDVAVYYCFQGSHVPNTFGQGTKVEIKGS

SEQ ID NO: 33632 - protein, 117 aa, Artificial Sequence; identical to SEQ ID NO: 33034
  Description of Artificial Sequence: Synthetic polypeptide
  VH of XENP023640

SEQ ID NO: 33633 - protein, 114 aa, Artificial Sequence
  Description of Artificial Sequence: Synthetic polypeptide
  VL of XENP023640
DVLMTQSPDSLAVSLGERATINCKSSQSIVHSNGNTYLEWYQQKPGQSPKLLIYKVSNRFSGVPDRFSGSGSGTDFTLTISSLQAEDVAVYYCFQGSHVPNTFGQGTKVEIKGS

SEQ ID NO: 33634 - protein, 5 aa, Artificial Sequence
  Description of Artificial Sequence: Synthetic peptide
  XENP023640 vhCDR1
HYGMN

SEQ ID NO: 33635 - protein, 17 aa, Artificial Sequence
  Description of Artificial Sequence: Synthetic peptide
  XENP023640 vhCDR2
WINTYTGEPTYADGFTG

SEQ ID NO: 33636 - protein, 8 aa, Artificial Sequence
  Description of Artificial Sequence: Synthetic peptide
  XENP023640 vhCDR3
DYYGSSPY

SEQ ID NO: 33637 - protein, 16 aa, Artificial Sequence
  Description of Artificial Sequence: Synthetic peptide
  XENP023640 vlCDR1
KSSQSIVHSNGNTYLE

SEQ ID NO: 33638 - protein, 7 aa, Artificial Sequence
  Description of Artificial Sequence: Synthetic peptide
  XENP023640 vlCDR2
KVSNRFS

SEQ ID NO: 33639 - protein, 9 aa, Artificial Sequence
  Description of Artificial Sequence: Synthetic peptide
  XENP023640 vlCDR3
FQGSHVPNT

SEQ ID NO: 33640 - protein, 251 aa, Artificial Sequence
  Description of Artificial Sequence: Synthetic polypeptide
  XENP023641 1C11_H3_L3.82_scFv
QIQLVQSGSELKKPGASVKVSCKASGYTFTHYGMNWVRQAPGQGLEWMGWINTYTGEPTYADGFTGRFVFSLDTSVSTAYLQISSLKAEDTAVYFCARDYYGSSPYWGQGTLVTVSSGKPGSGKPGSGKPGSGKPGSDVLMTQSPDSLAVSLGERATINCKSSQSIVHSNGNTYLEWYQQKPGQSPKLLIYKVSNRFSGVPDRFSGSGSGTDFTLTISSLQAEDVAVYYCFQGSHVPNTFGGGTKLEIKGS

SEQ ID NO: 33641 - protein, 117 aa, Artificial Sequence; identical to SEQ ID NO: 33034
  Description of Artificial Sequence: Synthetic polypeptide
  VH of XENP023641

SEQ ID NO: 33642 - protein, 114 aa, Artificial Sequence
  Description of Artificial Sequence: Synthetic polypeptide
  VL of XENP023641
DVLMTQSPDSLAVSLGERATINCKSSQSIVHSNGNTYLEWYQQKPGQSPKLLIYKVSNRFSGVPDRFSGSGSGTDFTLTISSLQAEDVAVYYCFQGSHVPNTFGGGTKLEIKGS

SEQ ID NO: 33643 - protein, 5 aa, Artificial Sequence
  Description of Artificial Sequence: Synthetic peptide
  XENP023641 vhCDR1
HYGMN

SEQ ID NO: 33644 - protein, 17 aa, Artificial Sequence
  Description of Artificial Sequence: Synthetic peptide
  XENP023641 vhCDR2
WINTYTGEPTYADGFTG

SEQ ID NO: 33645 - protein, 8 aa, Artificial Sequence
  Description of Artificial Sequence: Synthetic peptide
  XENP023641 vhCDR3
DYYGSSPY

SEQ ID NO: 33646 - protein, 16 aa, Artificial Sequence
  Description of Artificial Sequence: Synthetic peptide
  XENP023641 vlCDR1
KSSQSIVHSNGNTYLE

SEQ ID NO: 33647 - protein, 7 aa, Artificial Sequence
  Description of Artificial Sequence: Synthetic peptide
  XENP023641 vlCDR2
KVSNRFS

SEQ ID NO: 33648 - protein, 9 aa, Artificial Sequence
  Description of Artificial Sequence: Synthetic peptide
  XENP023641 vlCDR3
FQGSHVPNT

SEQ ID NO: 33649 - protein, 251 aa, Artificial Sequence
  Description of Artificial Sequence: Synthetic polypeptide
  XENP023755 1C11_H3.1_L3_scFv
QVQLVQSGSELKKPGASVKVSCKASGYTFTHYGMNWVRQAPGQGLEWMGWINTYTGEPTYADGFTGRFVFSLDTSVSTAYLQISSLKAEDTAVYFCARDYYGSSPYWGQGTLVTVSSGKPGSGKPGSGKPGSGKPGSDVLMTQSPDSLAVSLGERATINCKSSQSIVHSNGNTYLEWYQQKPGQSPKLLIYKVSNRFSGVPDRFSGSGSGTDFTLTISSLQAEDVAVYYCFQGSHVPNTFGGGTKVEIKGS

SEQ ID NO: 33650 - protein, 117 aa, Artificial Sequence
  Description of Artificial Sequence: Synthetic polypeptide
  VH of XENP023755
QVQLVQSGSELKKPGASVKVSCKASGYTFTHYGMNWVRQAPGQGLEWMGWINTYTGEPTYADGFTGRFVFSLDTSVSTAYLQISSLKAEDTAVYFCARDYYGSSPYWGQGTLVTVSS

SEQ ID NO: 33651 - protein, 114 aa, Artificial Sequence
  Description of Artificial Sequence: Synthetic polypeptide
  VL of XENP023755
DVLMTQSPDSLAVSLGERATINCKSSQSIVHSNGNTYLEWYQQKPGQSPKLLIYKVSNRFSGVPDRFSGSGSGTDFTLTISSLQAEDVAVYYCFQGSHVPNTFGGGTKVEIKGS

SEQ ID NO: 33652 - protein, 5 aa, Artificial Sequence
  Description of Artificial Sequence: Synthetic peptide
  XENP023755 vhCDR1
HYGMN

SEQ ID NO: 33653 - protein, 17 aa, Artificial Sequence
  Description of Artificial Sequence: Synthetic peptide
  XENP023755 vhCDR2
WINTYTGEPTYADGFTG

SEQ ID NO: 33654 - protein, 8 aa, Artificial Sequence
  Description of Artificial Sequence: Synthetic peptide
  XENP023755 vhCDR3
DYYGSSPY

SEQ ID NO: 33655 - protein, 16 aa, Artificial Sequence
  Description of Artificial Sequence: Synthetic peptide
  XENP023755 vlCDR1
KSSQSIVHSNGNTYLE

SEQ ID NO: 33656 - protein, 7 aa, Artificial Sequence
  Description of Artificial Sequence: Synthetic peptide
  XENP023755 vlCDR2
KVSNRFS

SEQ ID NO: 33657 - protein, 9 aa, Artificial Sequence
  Description of Artificial Sequence: Synthetic peptide
  XENP023755 vlCDR3
FQGSHVPNT

SEQ ID NO: 33658 - protein, 251 aa, Artificial Sequence
  Description of Artificial Sequence: Synthetic polypeptide
  XENP023756 1C11_H3.2_L3_scFv
QMQLVQSGSELKKPGASVKVSCKASGYTFTHYGMNWVRQAPGQGLEWMGWINTYTGEPTYADGFTGRFVFSLDTSVSTAYLQISSLKAEDTAVYFCARDYYGSSPYWGQGTLVTVSSGKPGSGKPGSGKPGSGKPGSDVLMTQSPDSLAVSLGERATINCKSSQSIVHSNGNTYLEWYQQKPGQSPKLLIYKVSNRFSGVPDRFSGSGSGTDFTLTISSLQAEDVAVYYCFQGSHVPNTFGGGTKVEIKGS

SEQ ID NO: 33659 - protein, 117 aa, Artificial Sequence
  Description of Artificial Sequence: Synthetic polypeptide
  VH of XENP023756
QMQLVQSGSELKKPGASVKVSCKASGYTFTHYGMNWVRQAPGQGLEWMGWINTYTGEPTYADGFTGRFVFSLDTSVSTAYLQISSLKAEDTAVYFCARDYYGSSPYWGQGTLVTVSS

SEQ ID NO: 33660 - protein, 114 aa, Artificial Sequence; identical to SEQ ID NO: 33651
  Description of Artificial Sequence: Synthetic polypeptide
  VL of XENP023756

SEQ ID NO: 33661 - protein, 5 aa, Artificial Sequence
  Description of Artificial Sequence: Synthetic peptide
  XENP023756 vhCDR1
HYGMN

SEQ ID NO: 33662 - protein, 17 aa, Artificial Sequence
  Description of Artificial Sequence: Synthetic peptide
  XENP023756 vhCDR2
WINTYTGEPTYADGFTG

SEQ ID NO: 33663 - protein, 8 aa, Artificial Sequence
  Description of Artificial Sequence: Synthetic peptide
  XENP023756 vhCDR3
DYYGSSPY

SEQ ID NO: 33664 - protein, 16 aa, Artificial Sequence
  Description of Artificial Sequence: Synthetic peptide
  XENP023756 vlCDR1
KSSQSIVHSNGNTYLE

SEQ ID NO: 33665 - protein, 7 aa, Artificial Sequence
  Description of Artificial Sequence: Synthetic peptide
  XENP023756 vlCDR2
KVSNRFS

SEQ ID NO: 33666 - protein, 9 aa, Artificial Sequence
  Description of Artificial Sequence: Synthetic peptide
  XENP023756 vlCDR3
FQGSHVPNT

SEQ ID NO: 33667 - protein, 251 aa, Artificial Sequence
  Description of Artificial Sequence: Synthetic polypeptide
  XENP023757 1C11_H3.4_L3_scFv
QIQLQQSGSELKKPGASVKVSCKASGYTFTHYGMNWVRQAPGQGLEWMGWINTYTGEPTYADGFTGRFVFSLDTSVSTAYLQISSLKAEDTAVYFCARDYYGSSPYWGQGTLVTVSSGKPGSGKPGSGKPGSGKPGSDVLMTQSPDSLAVSLGERATINCKSSQSIVHSNGNTYLEWYQQKPGQSPKLLIYKVSNRFSGVPDRFSGSGSGTDFTLTISSLQAEDVAVYYCFQGSHVPNTFGGGTKVEIKGS

SEQ ID NO: 33668 - protein, 117 aa, Artificial Sequence
  Description of Artificial Sequence: Synthetic polypeptide
  VH of XENP023757
QIQLQQSGSELKKPGASVKVSCKASGYTFTHYGMNWVRQAPGQGLEWMGWINTYTGEPTYADGFTGRFVFSLDTSVSTAYLQISSLKAEDTAVYFCARDYYGSSPYWGQGTLVTVSS

SEQ ID NO: 33669 - protein, 114 aa, Artificial Sequence; identical to SEQ ID NO: 33651
  Description of Artificial Sequence: Synthetic polypeptide
  VL of XENP023757

SEQ ID NO: 33670 - protein, 5 aa, Artificial Sequence
  Description of Artificial Sequence: Synthetic peptide
  XENP023757 vhCDR1
HYGMN

SEQ ID NO: 33671 - protein, 17 aa, Artificial Sequence
  Description of Artificial Sequence: Synthetic peptide
  XENP023757 vhCDR2
WINTYTGEPTYADGFTG

SEQ ID NO: 33672 - protein, 8 aa, Artificial Sequence
  Description of Artificial Sequence: Synthetic peptide
  XENP023757 vhCDR3
DYYGSSPY

SEQ ID NO: 33673 - protein, 16 aa, Artificial Sequence
  Description of Artificial Sequence: Synthetic peptide
  XENP023757 vlCDR1
KSSQSIVHSNGNTYLE

SEQ ID NO: 33674 - protein, 7 aa, Artificial Sequence
  Description of Artificial Sequence: Synthetic peptide
  XENP023757 vlCDR2
KVSNRFS

SEQ ID NO: 33675 - protein, 9 aa, Artificial Sequence
  Description of Artificial Sequence: Synthetic peptide
  XENP023757 vlCDR3
FQGSHVPNT

SEQ ID NO: 33676 - protein, 251 aa, Artificial Sequence
  Description of Artificial Sequence: Synthetic polypeptide
  XENP023758 1C11_H3.5_L3_scFv
QIQLVQSGAELKKPGASVKVSCKASGYTFTHYGMNWVRQAPGQGLEWMGWINTYTGEPTYADGFTGRFVFSLDTSVSTAYLQISSLKAEDTAVYFCARDYYGSSPYWGQGTLVTVSSGKPGSGKPGSGKPGSGKPGSDVLMTQSPDSLAVSLGERATINCKSSQSIVHSNGNTYLEWYQQKPGQSPKLLIYKVSNRFSGVPDRFSGSGSGTDFTLTISSLQAEDVAVYYCFQGSHVPNTFGGGTKVEIKGS

SEQ ID NO: 33677 - protein, 117 aa, Artificial Sequence
  Description of Artificial Sequence: Synthetic polypeptide
  VH of XENP023758
QIQLVQSGAELKKPGASVKVSCKASGYTFTHYGMNWVRQAPGQGLEWMGWINTYTGEPTYADGFTGRFVFSLDTSVSTAYLQISSLKAEDTAVYFCARDYYGSSPYWGQGTLVTVSS

SEQ ID NO: 33678 - protein, 114 aa, Artificial Sequence; identical to SEQ ID NO: 33651
  Description of Artificial Sequence: Synthetic polypeptide
  VL of XENP023758

SEQ ID NO: 33679 - protein, 5 aa, Artificial Sequence
  Description of Artificial Sequence: Synthetic peptide
  XENP023758 vhCDR1
HYGMN

SEQ ID NO: 33680 - protein, 17 aa, Artificial Sequence
  Description of Artificial Sequence: Synthetic peptide
  XENP023758 vhCDR2
WINTYTGEPTYADGFTG

SEQ ID NO: 33681 - protein, 8 aa, Artificial Sequence
  Description of Artificial Sequence: Synthetic peptide
  XENP023758 vhCDR3
DYYGSSPY

SEQ ID NO: 33682 - protein, 16 aa, Artificial Sequence
  Description of Artificial Sequence: Synthetic peptide
  XENP023758 vlCDR1
KSSQSIVHSNGNTYLE

SEQ ID NO: 33683 - protein, 7 aa, Artificial Sequence
  Description of Artificial Sequence: Synthetic peptide
  XENP023758 vlCDR2
KVSNRFS

SEQ ID NO: 33684 - protein, 9 aa, Artificial Sequence
  Description of Artificial Sequence: Synthetic peptide
  XENP023758 vlCDR3
FQGSHVPNT

SEQ ID NO: 33685 - protein, 251 aa, Artificial Sequence
  Description of Artificial Sequence: Synthetic polypeptide
  XENP023759 1C11_H3.6_L3_scFv
QIQLVQSGGELKKPGASVKVSCKASGYTFTHYGMNWVRQAPGQGLEWMGWINTYTGEPTYADGFTGRFVFSLDTSVSTAYLQISSLKAEDTAVYFCARDYYGSSPYWGQGTLVTVSSGKPGSGKPGSGKPGSGKPGSDVLMTQSPDSLAVSLGERATINCKSSQSIVHSNGNTYLEWYQQKPGQSPKLLIYKVSNRFSGVPDRFSGSGSGTDFTLTISSLQAEDVAVYYCFQGSHVPNTFGGGTKVEIKGS

SEQ ID NO: 33686 - protein, 117 aa, Artificial Sequence
  Description of Artificial Sequence: Synthetic polypeptide
  VH of XENP023759
QIQLVQSGGELKKPGASVKVSCKASGYTFTHYGMNWVRQAPGQGLEWMGWINTYTGEPTYADGFTGRFVFSLDTSVSTAYLQISSLKAEDTAVYFCARDYYGSSPYWGQGTLVTVSS

SEQ ID NO: 33687 - protein, 114 aa, Artificial Sequence; identical to SEQ ID NO: 33651
  Description of Artificial Sequence: Synthetic polypeptide
  VL of XENP023759

SEQ ID NO: 33688 - protein, 5 aa, Artificial Sequence
  Description of Artificial Sequence: Synthetic peptide
  XENP023759 vhCDR1
HYGMN

SEQ ID NO: 33689 - protein, 17 aa, Artificial Sequence
  Description of Artificial Sequence: Synthetic peptide
  XENP023759 vhCDR2
WINTYTGEPTYADGFTG

SEQ ID NO: 33690 - protein, 8 aa, Artificial Sequence
  Description of Artificial Sequence: Synthetic peptide
  XENP023759 vhCDR3
DYYGSSPY

SEQ ID NO: 33691 - protein, 16 aa, Artificial Sequence
  Description of Artificial Sequence: Synthetic peptide
  XENP023759 vlCDR1
KSSQSIVHSNGNTYLE

SEQ ID NO: 33692 - protein, 7 aa, Artificial Sequence
  Description of Artificial Sequence: Synthetic peptide
  XENP023759 vlCDR2
KVSNRFS

SEQ ID NO: 33693 - protein, 9 aa, Artificial Sequence
  Description of Artificial Sequence: Synthetic peptide
  XENP023759 vlCDR3
FQGSHVPNT

SEQ ID NO: 33694 - protein, 251 aa, Artificial Sequence
  Description of Artificial Sequence: Synthetic polypeptide
  XENP023760 1C11_H3.7_L3_scFv
QIQLVQSGPELKKPGASVKVSCKASGYTFTHYGMNWVRQAPGQGLEWMGWINTYTGEPTYADGFTGRFVFSLDTSVSTAYLQISSLKAEDTAVYFCARDYYGSSPYWGQGTLVTVSSGKPGSGKPGSGKPGSGKPGSDVLMTQSPDSLAVSLGERATINCKSSQSIVHSNGNTYLEWYQQKPGQSPKLLIYKVSNRFSGVPDRFSGSGSGTDFTLTISSLQAEDVAVYYCFQGSHVPNTFGGGTKVEIKGS

SEQ ID NO: 33695 - protein, 117 aa, Artificial Sequence
  Description of Artificial Sequence: Synthetic polypeptide
  VH of XENP023760
QIQLVQSGPELKKPGASVKVSCKASGYTFTHYGMNWVRQAPGQGLEWMGWINTYTGEPTYADGFTGRFVFSLDTSVSTAYLQISSLKAEDTAVYFCARDYYGSSPYWGQGTLVTVSS

SEQ ID NO: 33696 - protein, 114 aa, Artificial Sequence; identical to SEQ ID NO: 33651
  Description of Artificial Sequence: Synthetic polypeptide
  VL of XENP023760

SEQ ID NO: 33697 - protein, 5 aa, Artificial Sequence
  Description of Artificial Sequence: Synthetic peptide
  XENP023760 vhCDR1
HYGMN

SEQ ID NO: 33698 - protein, 17 aa, Artificial Sequence
  Description of Artificial Sequence: Synthetic peptide
  XENP023760 vhCDR2
WINTYTGEPTYADGFTG

SEQ ID NO: 33699 - protein, 8 aa, Artificial Sequence
  Description of Artificial Sequence: Synthetic peptide
  XENP023760 vhCDR3
DYYGSSPY

SEQ ID NO: 33700 - protein, 16 aa, Artificial Sequence
  Description of Artificial Sequence: Synthetic peptide
  XENP023760 vlCDR1
KSSQSIVHSNGNTYLE

SEQ ID NO: 33701 - protein, 7 aa, Artificial Sequence
  Description of Artificial Sequence: Synthetic peptide
  XENP023760 vlCDR2
KVSNRFS

SEQ ID NO: 33702 - protein, 9 aa, Artificial Sequence
  Description of Artificial Sequence: Synthetic peptide
  XENP023760 vlCDR3
FQGSHVPNT

SEQ ID NO: 33703 - protein, 251 aa, Artificial Sequence
  Description of Artificial Sequence: Synthetic polypeptide
  XENP023761 1C11_H3.8_L3_scFv
QIQLVQSGHELKKPGASVKVSCKASGYTFTHYGMNWVRQAPGQGLEWMGWINTYTGEPTYADGFTGRFVFSLDTSVSTAYLQISSLKAEDTAVYFCARDYYGSSPYWGQGTLVTVSSGKPGSGKPGSGKPGSGKPGSDVLMTQSPDSLAVSLGERATINCKSSQSIVHSNGNTYLEWYQQKPGQSPKLLIYKVSNRFSGVPDRFSGSGSGTDFTLTISSLQAEDVAVYYCFQGSHVPNTFGGGTKVEIKGS

SEQ ID NO: 33704 - protein, 117 aa, Artificial Sequence
  Description of Artificial Sequence: Synthetic polypeptide
  VH of XENP023761
QIQLVQSGHELKKPGASVKVSCKASGYTFTHYGMNWVRQAPGQGLEWMGWINTYTGEPTYADGFTGRFVFSLDTSVSTAYLQISSLKAEDTAVYFCARDYYGSSPYWGQGTLVTVSS

SEQ ID NO: 33705 - protein, 114 aa, Artificial Sequence; identical to SEQ ID NO: 33651
  Description of Artificial Sequence: Synthetic polypeptide
  VL of XENP023761

SEQ ID NO: 33706 - protein, 5 aa, Artificial Sequence
  Description of Artificial Sequence: Synthetic peptide
  XENP023761 vhCDR1
HYGMN

SEQ ID NO: 33707 - protein, 17 aa, Artificial Sequence
  Description of Artificial Sequence: Synthetic peptide
  XENP023761 vhCDR2
WINTYTGEPTYADGFTG

SEQ ID NO: 33708 - protein, 8 aa, Artificial Sequence
  Description of Artificial Sequence: Synthetic peptide
  XENP023761 vhCDR3
DYYGSSPY

SEQ ID NO: 33709 - protein, 16 aa, Artificial Sequence
  Description of Artificial Sequence: Synthetic peptide
  XENP023761 vlCDR1
KSSQSIVHSNGNTYLE

SEQ ID NO: 33710 - protein, 7 aa, Artificial Sequence
  Description of Artificial Sequence: Synthetic peptide
  XENP023761 vlCDR2
KVSNRFS

SEQ ID NO: 33711 - protein, 9 aa, Artificial Sequence
  Description of Artificial Sequence: Synthetic peptide
  XENP023761 vlCDR3
FQGSHVPNT

SEQ ID NO: 33712 - protein, 251 aa, Artificial Sequence
  Description of Artificial Sequence: Synthetic polypeptide
  XENP023762 1C11_H3.11_L3_scFv
QIQLVQSGSELKKPGASVKLSCKASGYTFTHYGMNWVRQAPGQGLEWMGWINTYTGEPTYADGFTGRFVFSLDTSVSTAYLQISSLKAEDTAVYFCARDYYGSSPYWGQGTLVTVSSGKPGSGKPGSGKPGSGKPGSDVLMTQSPDSLAVSLGERATINCKSSQSIVHSNGNTYLEWYQQKPGQSPKLLIYKVSNRFSGVPDRFSGSGSGTDFTLTISSLQAEDVAVYYCFQGSHVPNTFGGGTKVEIKGS

SEQ ID NO: 33713 - protein, 117 aa, Artificial Sequence
  Description of Artificial Sequence: Synthetic polypeptide
  VH of XENP023762
QIQLVQSGSELKKPGASVKLSCKASGYTFTHYGMNWVRQAPGQGLEWMGWINTYTGEPTYADGFTGRFVFSLDTSVSTAYLQISSLKAEDTAVYFCARDYYGSSPYWGQGTLVTVSS

SEQ ID NO: 33714 - protein, 114 aa, Artificial Sequence; identical to SEQ ID NO: 33651
  Description of Artificial Sequence: Synthetic polypeptide
  VL of XENP023762

SEQ ID NO: 33715 - protein, 5 aa, Artificial Sequence
  Description of Artificial Sequence: Synthetic peptide
  XENP023762 vhCDR1
HYGMN

SEQ ID NO: 33716 - protein, 17 aa, Artificial Sequence
  Description of Artificial Sequence: Synthetic peptide
  XENP023762 vhCDR2
WINTYTGEPTYADGFTG

SEQ ID NO: 33717 - protein, 8 aa, Artificial Sequence
  Description of Artificial Sequence: Synthetic peptide
  XENP023762 vhCDR3
DYYGSSPY

SEQ ID NO: 33718 - protein, 16 aa, Artificial Sequence
  Description of Artificial Sequence: Synthetic peptide
  XENP023762 vlCDR1
KSSQSIVHSNGNTYLE

SEQ ID NO: 33719 - protein, 7 aa, Artificial Sequence
  Description of Artificial Sequence: Synthetic peptide
  XENP023762 vlCDR2
KVSNRFS

SEQ ID NO: 33720 - protein, 9 aa, Artificial Sequence
  Description of Artificial Sequence: Synthetic peptide
  XENP023762 vlCDR3
FQGSHVPNT

SEQ ID NO: 33721 - protein, 251 aa, Artificial Sequence
  Description of Artificial Sequence: Synthetic polypeptide
  XENP023763 1C11_H3.12_L3_scFv
QIQLVQSGSELKKPGASVKMSCKASGYTFTHYGMNWVRQAPGQGLEWMGWINTYTGEPTYADGFTGRFVFSLDTSVSTAYLQISSLKAEDTAVYFCARDYYGSSPYWGQGTLVTVSSGKPGSGKPGSGKPGSGKPGSDVLMTQSPDSLAVSLGERATINCKSSQSIVHSNGNTYLEWYQQKPGQSPKLLIYKVSNRFSGVPDRFSGSGSGTDFTLTISSLQAEDVAVYYCFQGSHVPNTFGGGTKVEIKGS

SEQ ID NO: 33722 - protein, 117 aa, Artificial Sequence
  Description of Artificial Sequence: Synthetic polypeptide
  VH of XENP023763
QIQLVQSGSELKKPGASVKMSCKASGYTFTHYGMNWVRQAPGQGLEWMGWINTYTGEPTYADGFTGRFVFSLDTSVSTAYLQISSLKAEDTAVYFCARDYYGSSPYWGQGTLVTVSS

SEQ ID NO: 33723 - protein, 114 aa, Artificial Sequence; identical to SEQ ID NO: 33651
  Description of Artificial Sequence: Synthetic polypeptide
  VL of XENP023763

SEQ ID NO: 33724 - protein, 5 aa, Artificial Sequence
  Description of Artificial Sequence: Synthetic peptide
  XENP023763 vhCDR1
HYGMN

SEQ ID NO: 33725 - protein, 17 aa, Artificial Sequence
  Description of Artificial Sequence: Synthetic peptide
  XENP023763 vhCDR2
WINTYTGEPTYADGFTG

SEQ ID NO: 33726 - protein, 8 aa, Artificial Sequence
  Description of Artificial Sequence: Synthetic peptide
  XENP023763 vhCDR3
DYYGSSPY

SEQ ID NO: 33727 - protein, 16 aa, Artificial Sequence
  Description of Artificial Sequence: Synthetic peptide
  XENP023763 vlCDR1
KSSQSIVHSNGNTYLE

SEQ ID NO: 33728 - protein, 7 aa, Artificial Sequence
  Description of Artificial Sequence: Synthetic peptide
  XENP023763 vlCDR2
KVSNRFS

SEQ ID NO: 33729 - protein, 9 aa, Artificial Sequence
  Description of Artificial Sequence: Synthetic peptide
  XENP023763 vlCDR3
FQGSHVPNT

SEQ ID NO: 33730 - protein, 251 aa, Artificial Sequence
  Description of Artificial Sequence: Synthetic polypeptide
  XENP023764 1C11_H3.16_L3_scFv
QIQLVQSGSELKKPGASVKVSCKASGYTFTHYAMNWVRQAPGQGLEWMGWINTYTGEPTYADGFTGRFVFSLDTSVSTAYLQISSLKAEDTAVYFCARDYYGSSPYWGQGTLVTVSSGKPGSGKPGSGKPGSGKPGSDVLMTQSPDSLAVSLGERATINCKSSQSIVHSNGNTYLEWYQQKPGQSPKLLIYKVSNRFSGVPDRFSGSGSGTDFTLTISSLQAEDVAVYYCFQGSHVPNTFGGGTKVEIKGS

SEQ ID NO: 33731 - protein, 117 aa, Artificial Sequence
  Description of Artificial Sequence: Synthetic polypeptide
  VH of XENP023764
QIQLVQSGSELKKPGASVKVSCKASGYTFTHYAMNWVRQAPGQGLEWMGWINTYTGEPTYADGFTGRFVFSLDTSVSTAYLQISSLKAEDTAVYFCARDYYGSSPYWGQGTLVTVSS

SEQ ID NO: 33732 - protein, 114 aa, Artificial Sequence; identical to SEQ ID NO: 33651
  Description of Artificial Sequence: Synthetic polypeptide
  VL of XENP023764

SEQ ID NO: 33733 - protein, 5 aa, Artificial Sequence
  Description of Artificial Sequence: Synthetic peptide
  XENP023764 vhCDR1
HYAMN

SEQ ID NO: 33734 - protein, 17 aa, Artificial Sequence
  Description of Artificial Sequence: Synthetic peptide
  XENP023764 vhCDR2
WINTYTGEPTYADGFTG

SEQ ID NO: 33735 - protein, 8 aa, Artificial Sequence
  Description of Artificial Sequence: Synthetic peptide
  XENP023764 vhCDR3
DYYGSSPY

SEQ ID NO: 33736 - protein, 16 aa, Artificial Sequence
  Description of Artificial Sequence: Synthetic peptide
  XENP023764 vlCDR1
KSSQSIVHSNGNTYLE

SEQ ID NO: 33737 - protein, 7 aa, Artificial Sequence
  Description of Artificial Sequence: Synthetic peptide
  XENP023764 vlCDR2
KVSNRFS

SEQ ID NO: 33738 - protein, 9 aa, Artificial Sequence
  Description of Artificial Sequence: Synthetic peptide
  XENP023764 vlCDR3
FQGSHVPNT

SEQ ID NO: 33739 - protein, 251 aa, Artificial Sequence
  Description of Artificial Sequence: Synthetic polypeptide
  XENP023765 1C11_H3.18_L3_scFv
QIQLVQSGSELKKPGASVKVSCKASGYTFTHYGMNWVKQAPGQGLEWMGWINTYTGEPTYADGFTGRFVFSLDTSVSTAYLQISSLKAEDTAVYFCARDYYGSSPYWGQGTLVTVSSGKPGSGKPGSGKPGSGKPGSDVLMTQSPDSLAVSLGERATINCKSSQSIVHSNGNTYLEWYQQKPGQSPKLLIYKVSNRFSGVPDRFSGSGSGTDFTLTISSLQAEDVAVYYCFQGSHVPNTFGGGTKVEIKGS

SEQ ID NO: 33740 - protein, 117 aa, Artificial Sequence
  Description of Artificial Sequence: Synthetic polypeptide
  VH of XENP023765
QIQLVQSGSELKKPGASVKVSCKASGYTFTHYGMNWVKQAPGQGLEWMGWINTYTGEPTYADGFTGRFVFSLDTSVSTAYLQISSLKAEDTAVYFCARDYYGSSPYWGQGTLVTVSS

SEQ ID NO: 33741 - protein, 114 aa, Artificial Sequence; identical to SEQ ID NO: 33651
  Description of Artificial Sequence: Synthetic polypeptide
  VL of XENP023765

SEQ ID NO: 33742 - protein, 5 aa, Artificial Sequence
  Description of Artificial Sequence: Synthetic peptide
  XENP023765 vhCDR1
HYGMN

SEQ ID NO: 33743 - protein, 17 aa, Artificial Sequence
  Description of Artificial Sequence: Synthetic peptide
  XENP023765 vhCDR2
WINTYTGEPTYADGFTG

SEQ ID NO: 33744 - protein, 8 aa, Artificial Sequence
  Description of Artificial Sequence: Synthetic peptide
  XENP023765 vhCDR3
DYYGSSPY

SEQ ID NO: 33745 - protein, 16 aa, Artificial Sequence
  Description of Artificial Sequence: Synthetic peptide
  XENP023765 vlCDR1
KSSQSIVHSNGNTYLE

SEQ ID NO: 33746 - protein, 7 aa, Artificial Sequence
  Description of Artificial Sequence: Synthetic peptide
  XENP023765 vlCDR2
KVSNRFS

SEQ ID NO: 33747 - protein, 9 aa, Artificial Sequence
  Description of Artificial Sequence: Synthetic peptide
  XENP023765 vlCDR3
FQGSHVPNT

SEQ ID NO: 33748 - protein, 251 aa, Artificial Sequence
  Description of Artificial Sequence: Synthetic polypeptide
  XENP023766 1C11_H3.19_L3_scFv
QIQLVQSGSELKKPGASVKVSCKASGYTFTHYGMNWVRQAPGKGLEWMGWINTYTGEPTYADGFTGRFVFSLDTSVSTAYLQISSLKAEDTAVYFCARDYYGSSPYWGQGTLVTVSSGKPGSGKPGSGKPGSGKPGSDVLMTQSPDSLAVSLGERATINCKSSQSIVHSNGNTYLEWYQQKPGQSPKLLIYKVSNRFSGVPDRFSGSGSGTDFTLTISSLQAEDVAVYYCFQGSHVPNTFGGGTKVEIKGS

SEQ ID NO: 33749 - protein, 117 aa, Artificial Sequence
  Description of Artificial Sequence: Synthetic polypeptide
  VH of XENP023766
QIQLVQSGSELKKPGASVKVSCKASGYTFTHYGMNWVRQAPGKGLEWMGWINTYTGEPTYADGFTGRFVFSLDTSVSTAYLQISSLKAEDTAVYFCARDYYGSSPYWGQGTLVTVSS

SEQ ID NO: 33750 - protein, 114 aa, Artificial Sequence; identical to SEQ ID NO: 33651
  Description of Artificial Sequence: Synthetic polypeptide
  VL of XENP023766

SEQ ID NO: 33751 - protein, 5 aa, Artificial Sequence
  Description of Artificial Sequence: Synthetic peptide
  XENP023766 vhCDR1
HYGMN

SEQ ID NO: 33752 - protein, 17 aa, Artificial Sequence
  Description of Artificial Sequence: Synthetic peptide
  XENP023766 vhCDR2
WINTYTGEPTYADGFTG

SEQ ID NO: 33753 - protein, 8 aa, Artificial Sequence
  Description of Artificial Sequence: Synthetic peptide
  XENP023766 vhCDR3
DYYGSSPY

SEQ ID NO: 33754 - protein, 16 aa, Artificial Sequence
  Description of Artificial Sequence: Synthetic peptide
  XENP023766 vlCDR1
KSSQSIVHSNGNTYLE

SEQ ID NO: 33755 - protein, 7 aa, Artificial Sequence
  Description of Artificial Sequence: Synthetic peptide
  XENP023766 vlCDR2
KVSNRFS

SEQ ID NO: 33756 - protein, 9 aa, Artificial Sequence
  Description of Artificial Sequence: Synthetic peptide
  XENP023766 vlCDR3
FQGSHVPNT

SEQ ID NO: 33757 - protein, 251 aa, Artificial Sequence
  Description of Artificial Sequence: Synthetic polypeptide
  XENP023767 1C11_H3.20_L3_scFv
QIQLVQSGSELKKPGASVKVSCKASGYTFTHYGMNWVRQAPGRGLEWMGWINTYTGEPTYADGFTGRFVFSLDTSVSTAYLQISSLKAEDTAVYFCARDYYGSSPYWGQGTLVTVSSGKPGSGKPGSGKPGSGKPGSDVLMTQSPDSLAVSLGERATINCKSSQSIVHSNGNTYLEWYQQKPGQSPKLLIYKVSNRFSGVPDRFSGSGSGTDFTLTISSLQAEDVAVYYCFQGSHVPNTFGGGTKVEIKGS

SEQ ID NO: 33758 - protein, 117 aa, Artificial Sequence
  Description of Artificial Sequence: Synthetic polypeptide
  VH of XENP023767
QIQLVQSGSELKKPGASVKVSCKASGYTFTHYGMNWVRQAPGRGLEWMGWINTYTGEPTYADGFTGRFVFSLDTSVSTAYLQISSLKAEDTAVYFCARDYYGSSPYWGQGTLVTVSS

SEQ ID NO: 33759 - protein, 114 aa, Artificial Sequence; identical to SEQ ID NO: 33651
  Description of Artificial Sequence: Synthetic polypeptide
  VL of XENP023767

SEQ ID NO: 33760 - protein, 5 aa, Artificial Sequence
  Description of Artificial Sequence: Synthetic peptide
  XENP023767 vhCDR1
HYGMN

SEQ ID NO: 33761 - protein, 17 aa, Artificial Sequence
  Description of Artificial Sequence: Synthetic peptide
  XENP023767 vhCDR2
WINTYTGEPTYADGFTG

SEQ ID NO: 33762 - protein, 8 aa, Artificial Sequence
  Description of Artificial Sequence: Synthetic peptide
  XENP023767 vhCDR3
DYYGSSPY

SEQ ID NO: 33763 - protein, 16 aa, Artificial Sequence
  Description of Artificial Sequence: Synthetic peptide
  XENP023767 vlCDR1
KSSQSIVHSNGNTYLE

SEQ ID NO: 33764 - protein, 7 aa, Artificial Sequence
  Description of Artificial Sequence: Synthetic peptide
  XENP023767 vlCDR2
KVSNRFS

SEQ ID NO: 33765 - protein, 9 aa, Artificial Sequence
  Description of Artificial Sequence: Synthetic peptide
  XENP023767 vlCDR3
FQGSHVPNT

SEQ ID NO: 33766 - protein, 251 aa, Artificial Sequence
  Description of Artificial Sequence: Synthetic polypeptide
  XENP023768 1C11_H3.21_L3_scFv
QIQLVQSGSELKKPGASVKVSCKASGYTFTHYGMNWVRQAPGHGLEWMGWINTYTGEPTYADGFTGRFVFSLDTSVSTAYLQISSLKAEDTAVYFCARDYYGSSPYWGQGTLVTVSSGKPGSGKPGSGKPGSGKPGSDVLMTQSPDSLAVSLGERATINCKSSQSIVHSNGNTYLEWYQQKPGQSPKLLIYKVSNRFSGVPDRFSGSGSGTDFTLTISSLQAEDVAVYYCFQGSHVPNTFGGGTKVEIKGS

SEQ ID NO: 33767 - protein, 117 aa, Artificial Sequence
  Description of Artificial Sequence: Synthetic polypeptide
  VH of XENP023768
QIQLVQSGSELKKPGASVKVSCKASGYTFTHYGMNWVRQAPGHGLEWMGWINTYTGEPTYADGFTGRFVFSLDTSVSTAYLQISSLKAEDTAVYFCARDYYGSSPYWGQGTLVTVSS

SEQ ID NO: 33768 - protein, 114 aa, Artificial Sequence; identical to SEQ ID NO: 33651
  Description of Artificial Sequence: Synthetic polypeptide
  VL of XENP023768

SEQ ID NO: 33769 - protein, 5 aa, Artificial Sequence
  Description of Artificial Sequence: Synthetic peptide
  XENP023768 vhCDR1
HYGMN

SEQ ID NO: 33770 - protein, 17 aa, Artificial Sequence
  Description of Artificial Sequence: Synthetic peptide
  XENP023768 vhCDR2
WINTYTGEPTYADGFTG

SEQ ID NO: 33771 - protein, 8 aa, Artificial Sequence
  Description of Artificial Sequence: Synthetic peptide
  XENP023768 vhCDR3
DYYGSSPY

SEQ ID NO: 33772 - protein, 16 aa, Artificial Sequence
  Description of Artificial Sequence: Synthetic peptide
  XENP023768 vlCDR1
KSSQSIVHSNGNTYLE

SEQ ID NO: 33773 - protein, 7 aa, Artificial Sequence
  Description of Artificial Sequence: Synthetic peptide
  XENP023768 vlCDR2
KVSNRFS

SEQ ID NO: 33774 - protein, 9 aa, Artificial Sequence
  Description of Artificial Sequence: Synthetic peptide
  XENP023768 vlCDR3
FQGSHVPNT

SEQ ID NO: 33775 - protein, 251 aa, Artificial Sequence
  Description of Artificial Sequence: Synthetic polypeptide
  XENP023769 1C11_H3.22_L3_scFv
QIQLVQSGSELKKPGASVKVSCKASGYTFTHYGMNWVRQAPGEGLEWMGWINTYTGEPTYADGFTGRFVFSLDTSVSTAYLQISSLKAEDTAVYFCARDYYGSSPYWGQGTLVTVSSGKPGSGKPGSGKPGSGKPGSDVLMTQSPDSLAVSLGERATINCKSSQSIVHSNGNTYLEWYQQKPGQSPKLLIYKVSNRFSGVPDRFSGSGSGTDFTLTISSLQAEDVAVYYCFQGSHVPNTFGGGTKVEIKGS

SEQ ID NO: 33776 - protein, 117 aa, Artificial Sequence
  Description of Artificial Sequence: Synthetic polypeptide
  VH of XENP023769
QIQLVQSGSELKKPGASVKVSCKASGYTFTHYGMNWVRQAPGEGLEWMGWINTYTGEPTYADGFTGRFVFSLDTSVSTAYLQISSLKAEDTAVYFCARDYYGSSPYWGQGTLVTVSS

SEQ ID NO: 33777 - protein, 114 aa, Artificial Sequence; identical to SEQ ID NO: 33651
  Description of Artificial Sequence: Synthetic polypeptide
  VL of XENP023769

SEQ ID NO: 33778 - protein, 5 aa, Artificial Sequence
  Description of Artificial Sequence: Synthetic peptide
  XENP023769 vhCDR1
HYGMN

SEQ ID NO: 33779 - protein, 17 aa, Artificial Sequence
  Description of Artificial Sequence: Synthetic peptide
  XENP023769 vhCDR2
WINTYTGEPTYADGFTG

SEQ ID NO: 33780 - protein, 8 aa, Artificial Sequence
  Description of Artificial Sequence: Synthetic peptide
  XENP023769 vhCDR3
DYYGSSPY

SEQ ID NO: 33781 - protein, 16 aa, Artificial Sequence
  Description of Artificial Sequence: Synthetic peptide
  XENP023769 vlCDR1
KSSQSIVHSNGNTYLE

SEQ ID NO: 33782 - protein, 7 aa, Artificial Sequence
  Description of Artificial Sequence: Synthetic peptide
  XENP023769 vlCDR2
KVSNRFS

SEQ ID NO: 33783 - protein, 9 aa, Artificial Sequence
  Description of Artificial Sequence: Synthetic peptide
  XENP023769 vlCDR3
FQGSHVPNT

SEQ ID NO: 33784 - protein, 251 aa, Artificial Sequence
  Description of Artificial Sequence: Synthetic polypeptide
  XENP023770 1C11_H3.25_L3_scFv
QIQLVQSGSELKKPGASVKVSCKASGYTFTHYGMNWVRQAPGQGLEWMGWINTNTGEPTYADGFTGRFVFSLDTSVSTAYLQISSLKAEDTAVYFCARDYYGSSPYWGQGTLVTVSSGKPGSGKPGSGKPGSGKPGSDVLMTQSPDSLAVSLGERATINCKSSQSIVHSNGNTYLEWYQQKPGQSPKLLIYKVSNRFSGVPDRFSGSGSGTDFTLTISSLQAEDVAVYYCFQGSHVPNTFGGGTKVEIKGS

SEQ ID NO: 33785 - protein, 117 aa, Artificial Sequence
  Description of Artificial Sequence: Synthetic polypeptide
  VH of XENP023770
QIQLVQSGSELKKPGASVKVSCKASGYTFTHYGMNWVRQAPGQGLEWMGWINTNTGEPTYADGFTGRFVFSLDTSVSTAYLQISSLKAEDTAVYFCARDYYGSSPYWGQGTLVTVSS

SEQ ID NO: 33786 - protein, 114 aa, Artificial Sequence; identical to SEQ ID NO: 33651
  Description of Artificial Sequence: Synthetic polypeptide
  VL of XENP023770

SEQ ID NO: 33787 - protein, 5 aa, Artificial Sequence
  Description of Artificial Sequence: Synthetic peptide
  XENP023770 vhCDR1
HYGMN

SEQ ID NO: 33788 - protein, 17 aa, Artificial Sequence
  Description of Artificial Sequence: Synthetic peptide
  XENP023770 vhCDR2
WINTNTGEPTYADGFTG

SEQ ID NO: 33789 - protein, 8 aa, Artificial Sequence
  Description of Artificial Sequence: Synthetic peptide
  XENP023770 vhCDR3
DYYGSSPY

SEQ ID NO: 33790 - protein, 16 aa, Artificial Sequence
  Description of Artificial Sequence: Synthetic peptide
  XENP023770 vlCDR1
KSSQSIVHSNGNTYLE

SEQ ID NO: 33791 - protein, 7 aa, Artificial Sequence
  Description of Artificial Sequence: Synthetic peptide
  XENP023770 vlCDR2
KVSNRFS

SEQ ID NO: 33792 - protein, 9 aa, Artificial Sequence
  Description of Artificial Sequence: Synthetic peptide
  XENP023770 vlCDR3
FQGSHVPNT

SEQ ID NO: 33793 - protein, 251 aa, Artificial Sequence
  Description of Artificial Sequence: Synthetic polypeptide
  XENP023771 1C11_H3.26_L3_scFv
QIQLVQSGSELKKPGASVKVSCKASGYTFTHYGMNWVRQAPGQGLEWMGWINTYTGHPTYADGFTGRFVFSLDTSVSTAYLQISSLKAEDTAVYFCARDYYGSSPYWGQGTLVTVSSGKPGSGKPGSGKPGSGKPGSDVLMTQSPDSLAVSLGERATINCKSSQSIVHSNGNTYLEWYQQKPGQSPKLLIYKVSNRFSGVPDRFSGSGSGTDFTLTISSLQAEDVAVYYCFQGSHVPNTFGGGTKVEIKGS

SEQ ID NO: 33794 - protein, 117 aa, Artificial Sequence
  Description of Artificial Sequence: Synthetic polypeptide
  VH of XENP023771
QIQLVQSGSELKKPGASVKVSCKASGYTFTHYGMNWVRQAPGQGLEWMGWINTYTGHPTYADGFTGRFVFSLDTSVSTAYLQISSLKAEDTAVYFCARDYYGSSPYWGQGTLVTVSS

SEQ ID NO: 33795 - protein, 114 aa, Artificial Sequence; identical to SEQ ID NO: 33651
  Description of Artificial Sequence: Synthetic polypeptide
  VL of XENP023771

SEQ ID NO: 33796 - protein, 5 aa, Artificial Sequence
  Description of Artificial Sequence: Synthetic peptide
  XENP023771 vhCDR1
HYGMN

SEQ ID NO: 33797 - protein, 17 aa, Artificial Sequence
  Description of Artificial Sequence: Synthetic peptide
  XENP023771 vhCDR2
WINTYTGHPTYADGFTG

SEQ ID NO: 33798 - protein, 8 aa, Artificial Sequence
  Description of Artificial Sequence: Synthetic peptide
  XENP023771 vhCDR3
DYYGSSPY

SEQ ID NO: 33799 - protein, 16 aa, Artificial Sequence
  Description of Artificial Sequence: Synthetic peptide
  XENP023771 vlCDR1
KSSQSIVHSNGNTYLE

SEQ ID NO: 33800 - protein, 7 aa, Artificial Sequence
  Description of Artificial Sequence: Synthetic peptide
  XENP023771 vlCDR2
KVSNRFS

SEQ ID NO: 33801 - protein, 9 aa, Artificial Sequence
  Description of Artificial Sequence: Synthetic peptide
  XENP023771 vlCDR3
FQGSHVPNT

SEQ ID NO: 33802 - protein, 251 aa, Artificial Sequence
  Description of Artificial Sequence: Synthetic polypeptide
  XENP023772 1C11_H3.30_L3_scFv
QIQLVQSGSELKKPGASVKVSCKASGYTFTHYGMNWVRQAPGQGLEWMGWINTYTGEPEYADGFTGRFVFSLDTSVSTAYLQISSLKAEDTAVYFCARDYYGSSPYWGQGTLVTVSSGKPGSGKPGSGKPGSGKPGSDVLMTQSPDSLAVSLGERATINCKSSQSIVHSNGNTYLEWYQQKPGQSPKLLIYKVSNRFSGVPDRFSGSGSGTDFTLTISSLQAEDVAVYYCFQGSHVPNTFGGGTKVEIKGS

SEQ ID NO: 33803 - protein, 117 aa, Artificial Sequence
  Description of Artificial Sequence: Synthetic polypeptide
  VH of XENP023772
QIQLVQSGSELKKPGASVKVSCKASGYTFTHYGMNWVRQAPGQGLEWMGWINTYTGEPEYADGFTGRFVFSLDTSVSTAYLQISSLKAEDTAVYFCARDYYGSSPYWGQGTLVTVSS

SEQ ID NO: 33804 - protein, 114 aa, Artificial Sequence; identical to SEQ ID NO: 33651
  Description of Artificial Sequence: Synthetic polypeptide
  VL of XENP023772

SEQ ID NO: 33805 - protein, 5 aa, Artificial Sequence
  Description of Artificial Sequence: Synthetic peptide
  XENP023772 vhCDR1
HYGMN

SEQ ID NO: 33806 - protein, 17 aa, Artificial Sequence
  Description of Artificial Sequence: Synthetic peptide
  XENP023772 vhCDR2
WINTYTGEPEYADGFTG

SEQ ID NO: 33807 - protein, 8 aa, Artificial Sequence
  Description of Artificial Sequence: Synthetic peptide
  XENP023772 vhCDR3
DYYGSSPY

SEQ ID NO: 33808 - protein, 16 aa, Artificial Sequence
  Description of Artificial Sequence: Synthetic peptide
  XENP023772 vlCDR1
KSSQSIVHSNGNTYLE

SEQ ID NO: 33809 - protein, 7 aa, Artificial Sequence
  Description of Artificial Sequence: Synthetic peptide
  XENP023772 vlCDR2
KVSNRFS

SEQ ID NO: 33810 - protein, 9 aa, Artificial Sequence
  Description of Artificial Sequence: Synthetic peptide
  XENP023772 vlCDR3
FQGSHVPNT

SEQ ID NO: 33811 - protein, 251 aa, Artificial Sequence
  Description of Artificial Sequence: Synthetic polypeptide
  XENP023773 1C11_H3.32_L3_scFv
QIQLVQSGSELKKPGASVKVSCKASGYTFTHYGMNWVRQAPGQGLEWMGWINTYTGEPTYNDGFTGRFVFSLDTSVSTAYLQISSLKAEDTAVYFCARDYYGSSPYWGQGTLVTVSSGKPGSGKPGSGKPGSGKPGSDVLMTQSPDSLAVSLGERATINCKSSQSIVHSNGNTYLEWYQQKPGQSPKLLIYKVSNRFSGVPDRFSGSGSGTDFTLTISSLQAEDVAVYYCFQGSHVPNTFGGGTKVEIKGS

SEQ ID NO: 33812 - protein, 117 aa, Artificial Sequence
  Description of Artificial Sequence: Synthetic polypeptide
  VH of XENP023773
QIQLVQSGSELKKPGASVKVSCKASGYTFTHYGMNWVRQAPGQGLEWMGWINTYTGEPTYNDGFTGRFVFSLDTSVSTAYLQISSLKAEDTAVYFCARDYYGSSPYWGQGTLVTVSS

SEQ ID NO: 33813 - protein, 114 aa, Artificial Sequence; identical to SEQ ID NO: 33651
  Description of Artificial Sequence: Synthetic polypeptide
  VL of XENP023773

SEQ ID NO: 33814 - protein, 5 aa, Artificial Sequence
  Description of Artificial Sequence: Synthetic peptide
  XENP023773 vhCDR1
HYGMN

SEQ ID NO: 33815 - protein, 17 aa, Artificial Sequence
  Description of Artificial Sequence: Synthetic peptide
  XENP023773 vhCDR2
WINTYTGEPTYNDGFTG

SEQ ID NO: 33816 - protein, 8 aa, Artificial Sequence
  Description of Artificial Sequence: Synthetic peptide
  XENP023773 vhCDR3
DYYGSSPY

SEQ ID NO: 33817 - protein, 16 aa, Artificial Sequence
  Description of Artificial Sequence: Synthetic peptide
  XENP023773 vlCDR1
KSSQSIVHSNGNTYLE

SEQ ID NO: 33818 - protein, 7 aa, Artificial Sequence
  Description of Artificial Sequence: Synthetic peptide
  XENP023773 vlCDR2
KVSNRFS

SEQ ID NO: 33819 - protein, 9 aa, Artificial Sequence
  Description of Artificial Sequence: Synthetic peptide
  XENP023773 vlCDR3
FQGSHVPNT

SEQ ID NO: 33820 - protein, 251 aa, Artificial Sequence
  Description of Artificial Sequence: Synthetic polypeptide
  XENP023774 1C11_H3.33_L3_scFv
QIQLVQSGSELKKPGASVKVSCKASGYTFTHYGMNWVRQAPGQGLEWMGWINTYTGEPTYAQGFTGRFVFSLDTSVSTAYLQISSLKAEDTAVYFCARDYYGSSPYWGQGTLVTVSSGKPGSGKPGSGKPGSGKPGSDVLMTQSPDSLAVSLGERATINCKSSQSIVHSNGNTYLEWYQQKPGQSPKLLIYKVSNRFSGVPDRFSGSGSGTDFTLTISSLQAEDVAVYYCFQGSHVPNTFGGGTKVEIKGS

SEQ ID NO: 33821 - protein, 117 aa, Artificial Sequence
  Description of Artificial Sequence: Synthetic polypeptide
  VH of XENP023774
QIQLVQSGSELKKPGASVKVSCKASGYTFTHYGMNWVRQAPGQGLEWMGWINTYTGEPTYAQGFTGRFVFSLDTSVSTAYLQISSLKAEDTAVYFCARDYYGSSPYWGQGTLVTVSS

SEQ ID NO: 33822 - protein, 114 aa, Artificial Sequence; identical to SEQ ID NO: 33651
  Description of Artificial Sequence: Synthetic polypeptide
  VL of XENP023774

SEQ ID NO: 33823 - protein, 5 aa, Artificial Sequence
  Description of Artificial Sequence: Synthetic peptide
  XENP023774 vhCDR1
HYGMN

SEQ ID NO: 33824 - protein, 17 aa, Artificial Sequence
  Description of Artificial Sequence: Synthetic peptide
  XENP023774 vhCDR2
WINTYTGEPTYAQGFTG

SEQ ID NO: 33825 - protein, 8 aa, Artificial Sequence
  Description of Artificial Sequence: Synthetic peptide
  XENP023774 vhCDR3
DYYGSSPY

SEQ ID NO: 33826 - protein, 16 aa, Artificial Sequence
  Description of Artificial Sequence: Synthetic peptide
  XENP023774 vlCDR1
KSSQSIVHSNGNTYLE

SEQ ID NO: 33827 - protein, 7 aa, Artificial Sequence
  Description of Artificial Sequence: Synthetic peptide
  XENP023774 vlCDR2
KVSNRFS

SEQ ID NO: 33828 - protein, 9 aa, Artificial Sequence
  Description of Artificial Sequence: Synthetic peptide
  XENP023774 vlCDR3
FQGSHVPNT

SEQ ID NO: 33829 - protein, 251 aa, Artificial Sequence
  Description of Artificial Sequence: Synthetic polypeptide
  XENP023775 1C11_H3.34_L3_scFv
QIQLVQSGSELKKPGASVKVSCKASGYTFTHYGMNWVRQAPGQGLEWMGWINTYTGEPTYAEGFTGRFVFSLDTSVSTAYLQISSLKAEDTAVYFCARDYYGSSPYWGQGTLVTVSSGKPGSGKPGSGKPGSGKPGSDVLMTQSPDSLAVSLGERATINCKSSQSIVHSNGNTYLEWYQQKPGQSPKLLIYKVSNRFSGVPDRFSGSGSGTDFTLTISSLQAEDVAVYYCFQGSHVPNTFGGGTKVEIKGS

SEQ ID NO: 33830 - protein, 117 aa, Artificial Sequence
  Description of Artificial Sequence: Synthetic polypeptide
  VH of XENP023775
QIQLVQSGSELKKPGASVKVSCKASGYTFTHYGMNWVRQAPGQGLEWMGWINTYTGEPTYAEGFTGRFVFSLDTSVSTAYLQISSLKAEDTAVYFCARDYYGSSPYWGQGTLVTVSS

SEQ ID NO: 33831 - protein, 114 aa, Artificial Sequence; identical to SEQ ID NO: 33651
  Description of Artificial Sequence: Synthetic polypeptide
  VL of XENP023775

SEQ ID NO: 33832 - protein, 5 aa, Artificial Sequence
  Description of Artificial Sequence: Synthetic peptide
  XENP023775 vhCDR1
HYGMN

SEQ ID NO: 33833 - protein, 17 aa, Artificial Sequence
  Description of Artificial Sequence: Synthetic peptide
  XENP023775 vhCDR2
WINTYTGEPTYAEGFTG

SEQ ID NO: 33834 - protein, 8 aa, Artificial Sequence
  Description of Artificial Sequence: Synthetic peptide
  XENP023775 vhCDR3
DYYGSSPY

SEQ ID NO: 33835 - protein, 16 aa, Artificial Sequence
  Description of Artificial Sequence: Synthetic peptide
  XENP023775 vlCDR1
KSSQSIVHSNGNTYLE

SEQ ID NO: 33836 - protein, 7 aa, Artificial Sequence
  Description of Artificial Sequence: Synthetic peptide
  XENP023775 vlCDR2
KVSNRFS

SEQ ID NO: 33837 - protein, 9 aa, Artificial Sequence
  Description of Artificial Sequence: Synthetic peptide
  XENP023775 vlCDR3
FQGSHVPNT

SEQ ID NO: 33838 - protein, 251 aa, Artificial Sequence
  Description of Artificial Sequence: Synthetic polypeptide
  XENP023776 1C11_H3.35_L3_scFv
QIQLVQSGSELKKPGASVKVSCKASGYTFTHYGMNWVRQAPGQGLEWMGWINTYTGEPTYADKFTGRFVFSLDTSVSTAYLQISSLKAEDTAVYFCARDYYGSSPYWGQGTLVTVSSGKPGSGKPGSGKPGSGKPGSDVLMTQSPDSLAVSLGERATINCKSSQSIVHSNGNTYLEWYQQKPGQSPKLLIYKVSNRFSGVPDRFSGSGSGTDFTLTISSLQAEDVAVYYCFQGSHVPNTFGGGTKVEIKGS

SEQ ID NO: 33839 - protein, 117 aa, Artificial Sequence
  Description of Artificial Sequence: Synthetic polypeptide
  VH of XENP023776
QIQLVQSGSELKKPGASVKVSCKASGYTFTHYGMNWVRQAPGQGLEWMGWINTYTGEPTYADKFTGRFVFSLDTSVSTAYLQISSLKAEDTAVYFCARDYYGSSPYWGQGTLVTVSS

SEQ ID NO: 33840 - protein, 114 aa, Artificial Sequence; identical to SEQ ID NO: 33651
  Description of Artificial Sequence: Synthetic polypeptide
  VL of XENP023776

SEQ ID NO: 33841 - protein, 5 aa, Artificial Sequence
  Description of Artificial Sequence: Synthetic peptide
  XENP023776 vhCDR1
HYGMN

SEQ ID NO: 33842 - protein, 17 aa, Artificial Sequence
  Description of Artificial Sequence: Synthetic peptide
  XENP023776 vhCDR2
WINTYTGEPTYADKFTG

SEQ ID NO: 33843 - protein, 8 aa, Artificial Sequence
  Description of Artificial Sequence: Synthetic peptide
  XENP023776 vhCDR3
DYYGSSPY

SEQ ID NO: 33844 - protein, 16 aa, Artificial Sequence
  Description of Artificial Sequence: Synthetic peptide
  XENP023776 vlCDR1
KSSQSIVHSNGNTYLE

SEQ ID NO: 33845 - protein, 7 aa, Artificial Sequence
  Description of Artificial Sequence: Synthetic peptide
  XENP023776 vlCDR2
KVSNRFS

SEQ ID NO: 33846 - protein, 9 aa, Artificial Sequence
  Description of Artificial Sequence: Synthetic peptide
  XENP023776 vlCDR3
FQGSHVPNT

SEQ ID NO: 33847 - protein, 251 aa, Artificial Sequence
  Description of Artificial Sequence: Synthetic polypeptide
  XENP023777 1C11_H3.38_L3_scFv
QIQLVQSGSELKKPGASVKVSCKASGYTFTHYGMNWVRQAPGQGLEWMGWINTYTGEPTYADGITGRFVFSLDTSVSTAYLQISSLKAEDTAVYFCARDYYGSSPYWGQGTLVTVSSGKPGSGKPGSGKPGSGKPGSDVLMTQSPDSLAVSLGERATINCKSSQSIVHSNGNTYLEWYQQKPGQSPKLLIYKVSNRFSGVPDRFSGSGSGTDFTLTISSLQAEDVAVYYCFQGSHVPNTFGGGTKVEIKGS

SEQ ID NO: 33848 - protein, 117 aa, Artificial Sequence
  Description of Artificial Sequence: Synthetic polypeptide
  VH of XENP023777
QIQLVQSGSELKKPGASVKVSCKASGYTFTHYGMNWVRQAPGQGLEWMGWINTYTGEPTYADGITGRFVFSLDTSVSTAYLQISSLKAEDTAVYFCARDYYGSSPYWGQGTLVTVSS

SEQ ID NO: 33849 - protein, 114 aa, Artificial Sequence; identical to SEQ ID NO: 33651
  Description of Artificial Sequence: Synthetic polypeptide
  VL of XENP023777

SEQ ID NO: 33850 - protein, 5 aa, Artificial Sequence
  Description of Artificial Sequence: Synthetic peptide
  XENP023777 vhCDR1
HYGMN

SEQ ID NO: 33851 - protein, 17 aa, Artificial Sequence
  Description of Artificial Sequence: Synthetic peptide
  XENP023777 vhCDR2
WINTYTGEPTYADGITG

SEQ ID NO: 33852 - protein, 8 aa, Artificial Sequence
  Description of Artificial Sequence: Synthetic peptide
  XENP023777 vhCDR3
DYYGSSPY

SEQ ID NO: 33853 - protein, 16 aa, Artificial Sequence
  Description of Artificial Sequence: Synthetic peptide
  XENP023777 vlCDR1
KSSQSIVHSNGNTYLE

SEQ ID NO: 33854 - protein, 7 aa, Artificial Sequence
  Description of Artificial Sequence: Synthetic peptide
  XENP023777 vlCDR2
KVSNRFS

SEQ ID NO: 33855 - protein, 9 aa, Artificial Sequence
  Description of Artificial Sequence: Synthetic peptide
  XENP023777 vlCDR3
FQGSHVPNT

SEQ ID NO: 33856 - protein, 251 aa, Artificial Sequence
  Description of Artificial Sequence: Synthetic polypeptide
  XENP023778 1C11_H3.39_L3_scFv
QIQLVQSGSELKKPGASVKVSCKASGYTFTHYGMNWVRQAPGQGLEWMGWINTYTGEPTYADGLTGRFVFSLDTSVSTAYLQISSLKAEDTAVYFCARDYYGSSPYWGQGTLVTVSSGKPGSGKPGSGKPGSGKPGSDVLMTQSPDSLAVSLGERATINCKSSQSIVHSNGNTYLEWYQQKPGQSPKLLIYKVSNRFSGVPDRFSGSGSGTDFTLTISSLQAEDVAVYYCFQGSHVPNTFGGGTKVEIKGS

SEQ ID NO: 33857 - protein, 117 aa, Artificial Sequence
  Description of Artificial Sequence: Synthetic polypeptide
  VH of XENP023778
QIQLVQSGSELKKPGASVKVSCKASGYTFTHYGMNWVRQAPGQGLEWMGWINTYTGEPTYADGLTGRFVFSLDTSVSTAYLQISSLKAEDTAVYFCARDYYGSSPYWGQGTLVTVSS

SEQ ID NO: 33858 - protein, 114 aa, Artificial Sequence; identical to SEQ ID NO: 33651
  Description of Artificial Sequence: Synthetic polypeptide
  VL of XENP023778

SEQ ID NO: 33859 - protein, 5 aa, Artificial Sequence
  Description of Artificial Sequence: Synthetic peptide
  XENP023778 vhCDR1
HYGMN

SEQ ID NO: 33860 - protein, 17 aa, Artificial Sequence
  Description of Artificial Sequence: Synthetic peptide
  XENP023778 vhCDR2
WINTYTGEPTYADGLTG

SEQ ID NO: 33861 - protein, 8 aa, Artificial Sequence
  Description of Artificial Sequence: Synthetic peptide
  XENP023778 vhCDR3
DYYGSSPY

SEQ ID NO: 33862 - protein, 16 aa, Artificial Sequence
  Description of Artificial Sequence: Synthetic peptide
  XENP023778 vlCDR1
KSSQSIVHSNGNTYLE

SEQ ID NO: 33863 - protein, 7 aa, Artificial Sequence
  Description of Artificial Sequence: Synthetic peptide
  XENP023778 vlCDR2
KVSNRFS

SEQ ID NO: 33864 - protein, 9 aa, Artificial Sequence
  Description of Artificial Sequence: Synthetic peptide
  XENP023778 vlCDR3
FQGSHVPNT

SEQ ID NO: 33865 - protein, 251 aa, Artificial Sequence
  Description of Artificial Sequence: Synthetic polypeptide
  XENP023779 1C11_H3.41_L3_scFv
QIQLVQSGSELKKPGASVKVSCKASGYTFTHYGMNWVRQAPGQGLEWMGWINTYTGEPTYADGFKGRFVFSLDTSVSTAYLQISSLKAEDTAVYFCARDYYGSSPYWGQGTLVTVSSGKPGSGKPGSGKPGSGKPGSDVLMTQSPDSLAVSLGERATINCKSSQSIVHSNGNTYLEWYQQKPGQSPKLLIYKVSNRFSGVPDRFSGSGSGTDFTLTISSLQAEDVAVYYCFQGSHVPNTFGGGTKVEIKGS

SEQ ID NO: 33866 - protein, 117 aa, Artificial Sequence
  Description of Artificial Sequence: Synthetic polypeptide
  VH of XENP023779
QIQLVQSGSELKKPGASVKVSCKASGYTFTHYGMNWVRQAPGQGLEWMGWINTYTGEPTYADGFKGRFVFSLDTSVSTAYLQISSLKAEDTAVYFCARDYYGSSPYWGQGTLVTVSS

SEQ ID NO: 33867 - protein, 114 aa, Artificial Sequence; identical to SEQ ID NO: 33651
  Description of Artificial Sequence: Synthetic polypeptide
  VL of XENP023779

SEQ ID NO: 33868 - protein, 5 aa, Artificial Sequence
  Description of Artificial Sequence: Synthetic peptide
  XENP023779 vhCDR1
HYGMN

SEQ ID NO: 33869 - protein, 17 aa, Artificial Sequence
  Description of Artificial Sequence: Synthetic peptide
  XENP023779 vhCDR2
WINTYTGEPTYADGFKG

SEQ ID NO: 33870 - protein, 8 aa, Artificial Sequence
  Description of Artificial Sequence: Synthetic peptide
  XENP023779 vhCDR3
DYYGSSPY

SEQ ID NO: 33871 - protein, 16 aa, Artificial Sequence
  Description of Artificial Sequence: Synthetic peptide
  XENP023779 vlCDR1
KSSQSIVHSNGNTYLE

SEQ ID NO: 33872 - protein, 7 aa, Artificial Sequence
  Description of Artificial Sequence: Synthetic peptide
  XENP023779 vlCDR2
KVSNRFS

SEQ ID NO: 33873 - protein, 9 aa, Artificial Sequence
  Description of Artificial Sequence: Synthetic peptide
  XENP023779 vlCDR3
FQGSHVPNT

SEQ ID NO: 33874 - protein, 251 aa, Artificial Sequence
  Description of Artificial Sequence: Synthetic polypeptide
  XENP023780 1C11_H3.42_L3_scFv
QIQLVQSGSELKKPGASVKVSCKASGYTFTHYGMNWVRQAPGQGLEWMGWINTYTGEPTYADGFQGRFVFSLDTSVSTAYLQISSLKAEDTAVYFCARDYYGSSPYWGQGTLVTVSSGKPGSGKPGSGKPGSGKPGSDVLMTQSPDSLAVSLGERATINCKSSQSIVHSNGNTYLEWYQQKPGQSPKLLIYKVSNRFSGVPDRFSGSGSGTDFTLTISSLQAEDVAVYYCFQGSHVPNTFGGGTKVEIKGS

SEQ ID NO: 33875 - protein, 117 aa, Artificial Sequence
  Description of Artificial Sequence: Synthetic polypeptide
  VH of XENP023780
QIQLVQSGSELKKPGASVKVSCKASGYTFTHYGMNWVRQAPGQGLEWMGWINTYTGEPTYADGFQGRFVFSLDTSVSTAYLQISSLKAEDTAVYFCARDYYGSSPYWGQGTLVTVSS

SEQ ID NO: 33876 - protein, 114 aa, Artificial Sequence; identical to SEQ ID NO: 33651
  Description of Artificial Sequence: Synthetic polypeptide
  VL of XENP023780

SEQ ID NO: 33877 - protein, 5 aa, Artificial Sequence
  Description of Artificial Sequence: Synthetic peptide
  XENP023780 vhCDR1
HYGMN

SEQ ID NO: 33878 - protein, 17 aa, Artificial Sequence
  Description of Artificial Sequence: Synthetic peptide
  XENP023780 vhCDR2
WINTYTGEPTYADGFQG

SEQ ID NO: 33879 - protein, 8 aa, Artificial Sequence
  Description of Artificial Sequence: Synthetic peptide
  XENP023780 vhCDR3
DYYGSSPY

SEQ ID NO: 33880 - protein, 16 aa, Artificial Sequence
  Description of Artificial Sequence: Synthetic peptide
  XENP023780 vlCDR1
KSSQSIVHSNGNTYLE

SEQ ID NO: 33881 - protein, 7 aa, Artificial Sequence
  Description of Artificial Sequence: Synthetic peptide
  XENP023780 vlCDR2
KVSNRFS

SEQ ID NO: 33882 - protein, 9 aa, Artificial Sequence
  Description of Artificial Sequence: Synthetic peptide
  XENP023780 vlCDR3
FQGSHVPNT

SEQ ID NO: 33883 - protein, 251 aa, Artificial Sequence
  Description of Artificial Sequence: Synthetic polypeptide
  XENP023781 1C11_H3.43_L3_scFv
QIQLVQSGSELKKPGASVKVSCKASGYTFTHYGMNWVRQAPGQGLEWMGWINTYTGEPTYADGFTGRVVFSLDTSVSTAYLQISSLKAEDTAVYFCARDYYGSSPYWGQGTLVTVSSGKPGSGKPGSGKPGSGKPGSDVLMTQSPDSLAVSLGERATINCKSSQSIVHSNGNTYLEWYQQKPGQSPKLLIYKVSNRFSGVPDRFSGSGSGTDFTLTISSLQAEDVAVYYCFQGSHVPNTFGGGTKVEIKGS

SEQ ID NO: 33884 - protein, 117 aa, Artificial Sequence
  Description of Artificial Sequence: Synthetic polypeptide
  VH of XENP023781
QIQLVQSGSELKKPGASVKVSCKASGYTFTHYGMNWVRQAPGQGLEWMGWINTYTGEPTYADGFTGRVVFSLDTSVSTAYLQISSLKAEDTAVYFCARDYYGSSPYWGQGTLVTVSS

SEQ ID NO: 33885 - protein, 114 aa, Artificial Sequence; identical to SEQ ID NO: 33651
  Description of Artificial Sequence: Synthetic polypeptide
  VL of XENP023781

SEQ ID NO: 33886 - protein, 5 aa, Artificial Sequence
  Description of Artificial Sequence: Synthetic peptide
  XENP023781 vhCDR1
HYGMN

SEQ ID NO: 33887 - protein, 17 aa, Artificial Sequence
  Description of Artificial Sequence: Synthetic peptide
  XENP023781 vhCDR2
WINTYTGEPTYADGFTG

SEQ ID NO: 33888 - protein, 8 aa, Artificial Sequence
  Description of Artificial Sequence: Synthetic peptide
  XENP023781 vhCDR3
DYYGSSPY

SEQ ID NO: 33889 - protein, 16 aa, Artificial Sequence
  Description of Artificial Sequence: Synthetic peptide
  XENP023781 vlCDR1
KSSQSIVHSNGNTYLE

SEQ ID NO: 33890 - protein, 7 aa, Artificial Sequence
  Description of Artificial Sequence: Synthetic peptide
  XENP023781 vlCDR2
KVSNRFS

SEQ ID NO: 33891 - protein, 9 aa, Artificial Sequence
  Description of Artificial Sequence: Synthetic peptide
  XENP023781 vlCDR3
FQGSHVPNT

SEQ ID NO: 33892 - protein, 251 aa, Artificial Sequence
  Description of Artificial Sequence: Synthetic polypeptide
  XENP023782 1C11_H3.44_L3_scFv
QIQLVQSGSELKKPGASVKVSCKASGYTFTHYGMNWVRQAPGQGLEWMGWINTYTGEPTYADGFTGRFIFSLDTSVSTAYLQISSLKAEDTAVYFCARDYYGSSPYWGQGTLVTVSSGKPGSGKPGSGKPGSGKPGSDVLMTQSPDSLAVSLGERATINCKSSQSIVHSNGNTYLEWYQQKPGQSPKLLIYKVSNRFSGVPDRFSGSGSGTDFTLTISSLQAEDVAVYYCFQGSHVPNTFGGGTKVEIKGS

SEQ ID NO: 33893 - protein, 117 aa, Artificial Sequence
  Description of Artificial Sequence: Synthetic polypeptide
  VH of XENP023782
QIQLVQSGSELKKPGASVKVSCKASGYTFTHYGMNWVRQAPGQGLEWMGWINTYTGEPTYADGFTGRFIFSLDTSVSTAYLQISSLKAEDTAVYFCARDYYGSSPYWGQGTLVTVSS

SEQ ID NO: 33894 - protein, 114 aa, Artificial Sequence; identical to SEQ ID NO: 33651
  Description of Artificial Sequence: Synthetic polypeptide
  VL of XENP023782

SEQ ID NO: 33895 - protein, 5 aa, Artificial Sequence
  Description of Artificial Sequence: Synthetic peptide
  XENP023782 vhCDR1
HYGMN

SEQ ID NO: 33896 - protein, 17 aa, Artificial Sequence
  Description of Artificial Sequence: Synthetic peptide
  XENP023782 vhCDR2
WINTYTGEPTYADGFTG

SEQ ID NO: 33897 - protein, 8 aa, Artificial Sequence
  Description of Artificial Sequence: Synthetic peptide
  XENP023782 vhCDR3
DYYGSSPY

SEQ ID NO: 33898 - protein, 16 aa, Artificial Sequence
  Description of Artificial Sequence: Synthetic peptide
  XENP023782 vlCDR1
KSSQSIVHSNGNTYLE

SEQ ID NO: 33899 - protein, 7 aa, Artificial Sequence
  Description of Artificial Sequence: Synthetic peptide
  XENP023782 vlCDR2
KVSNRFS

SEQ ID NO: 33900 - protein, 9 aa, Artificial Sequence
  Description of Artificial Sequence: Synthetic peptide
  XENP023782 vlCDR3
FQGSHVPNT

SEQ ID NO: 33901 - protein, 251 aa, Artificial Sequence
  Description of Artificial Sequence: Synthetic polypeptide
  XENP023783 1C11_H3.45_L3_scFv
QIQLVQSGSELKKPGASVKVSCKASGYTFTHYGMNWVRQAPGQGLEWMGWINTYTGEPTYADGFTGRFSFSLDTSVSTAYLQISSLKAEDTAVYFCARDYYGSSPYWGQGTLVTVSSGKPGSGKPGSGKPGSGKPGSDVLMTQSPDSLAVSLGERATINCKSSQSIVHSNGNTYLEWYQQKPGQSPKLLIYKVSNRFSGVPDRFSGSGSGTDFTLTISSLQAEDVAVYYCFQGSHVPNTFGGGTKVEIKGS

SEQ ID NO: 33902 - protein, 117 aa, Artificial Sequence
  Description of Artificial Sequence: Synthetic polypeptide
  VH of XENP023783
QIQLVQSGSELKKPGASVKVSCKASGYTFTHYGMNWVRQAPGQGLEWMGWINTYTGEPTYADGFTGRFSFSLDTSVSTAYLQISSLKAEDTAVYFCARDYYGSSPYWGQGTLVTVSS

SEQ ID NO: 33903 - protein, 114 aa, Artificial Sequence; identical to SEQ ID NO: 33651
  Description of Artificial Sequence: Synthetic polypeptide
  VL of XENP023783

SEQ ID NO: 33904 - protein, 5 aa, Artificial Sequence
  Description of Artificial Sequence: Synthetic peptide
  XENP023783 vhCDR1
HYGMN

SEQ ID NO: 33905 - protein, 17 aa, Artificial Sequence
  Description of Artificial Sequence: Synthetic peptide
  XENP023783 vhCDR2
WINTYTGEPTYADGFTG

SEQ ID NO: 33906 - protein, 8 aa, Artificial Sequence
  Description of Artificial Sequence: Synthetic peptide
  XENP023783 vhCDR3
DYYGSSPY

SEQ ID NO: 33907 - protein, 16 aa, Artificial Sequence
  Description of Artificial Sequence: Synthetic peptide
  XENP023783 vlCDR1
KSSQSIVHSNGNTYLE

SEQ ID NO: 33908 - protein, 7 aa, Artificial Sequence
  Description of Artificial Sequence: Synthetic peptide
  XENP023783 vlCDR2
KVSNRFS

SEQ ID NO: 33909 - protein, 9 aa, Artificial Sequence
  Description of Artificial Sequence: Synthetic peptide
  XENP023783 vlCDR3
FQGSHVPNT

SEQ ID NO: 33910 - protein, 251 aa, Artificial Sequence
  Description of Artificial Sequence: Synthetic polypeptide
  XENP023784 1C11_H3.46_L3_scFv
QIQLVQSGSELKKPGASVKVSCKASGYTFTHYGMNWVRQAPGQGLEWMGWINTYTGEPTYADGFTGRFTFSLDTSVSTAYLQISSLKAEDTAVYFCARDYYGSSPYWGQGTLVTVSSGKPGSGKPGSGKPGSGKPGSDVLMTQSPDSLAVSLGERATINCKSSQSIVHSNGNTYLEWYQQKPGQSPKLLIYKVSNRFSGVPDRFSGSGSGTDFTLTISSLQAEDVAVYYCFQGSHVPNTFGGGTKVEIKGS

SEQ ID NO: 33911 - protein, 117 aa, Artificial Sequence
  Description of Artificial Sequence: Synthetic polypeptide
  VH of XENP023784
QIQLVQSGSELKKPGASVKVSCKASGYTFTHYGMNWVRQAPGQGLEWMGWINTYTGEPTYADGFTGRFTFSLDTSVSTAYLQISSLKAEDTAVYFCARDYYGSSPYWGQGTLVTVSS

SEQ ID NO: 33912 - protein, 114 aa, Artificial Sequence; identical to SEQ ID NO: 33651
  Description of Artificial Sequence: Synthetic polypeptide
  VL of XENP023784

SEQ ID NO: 33913 - protein, 5 aa, Artificial Sequence
  Description of Artificial Sequence: Synthetic peptide
  XENP023784 vhCDR1
HYGMN

SEQ ID NO: 33914 - protein, 17 aa, Artificial Sequence
  Description of Artificial Sequence: Synthetic peptide
  XENP023784 vhCDR2
WINTYTGEPTYADGFTG

SEQ ID NO: 33915 - protein, 8 aa, Artificial Sequence
  Description of Artificial Sequence: Synthetic peptide
  XENP023784 vhCDR3
DYYGSSPY

SEQ ID NO: 33916 - protein, 16 aa, Artificial Sequence
  Description of Artificial Sequence: Synthetic peptide
  XENP023784 vlCDR1
KSSQSIVHSNGNTYLE

SEQ ID NO: 33917 - protein, 7 aa, Artificial Sequence
  Description of Artificial Sequence: Synthetic peptide
  XENP023784 vlCDR2
KVSNRFS

SEQ ID NO: 33918 - protein, 9 aa, Artificial Sequence
  Description of Artificial Sequence: Synthetic peptide
  XENP023784 vlCDR3
FQGSHVPNT

SEQ ID NO: 33919 - protein, 251 aa, Artificial Sequence
  Description of Artificial Sequence: Synthetic polypeptide
  XENP023785 1C11_H3.49_L3_scFv
QIQLVQSGSELKKPGASVKVSCKASGYTFTHYGMNWVRQAPGQGLEWMGWINTYTGEPTYADGFTGRFVMSLDTSVSTAYLQISSLKAEDTAVYFCARDYYGSSPYWGQGTLVTVSSGKPGSGKPGSGKPGSGKPGSDVLMTQSPDSLAVSLGERATINCKSSQSIVHSNGNTYLEWYQQKPGQSPKLLIYKVSNRFSGVPDRFSGSGSGTDFTLTISSLQAEDVAVYYCFQGSHVPNTFGGGTKVEIKGS

SEQ ID NO: 33920 - protein, 117 aa, Artificial Sequence
  Description of Artificial Sequence: Synthetic polypeptide
  VH of XENP023785
QIQLVQSGSELKKPGASVKVSCKASGYTFTHYGMNWVRQAPGQGLEWMGWINTYTGEPTYADGFTGRFVMSLDTSVSTAYLQISSLKAEDTAVYFCARDYYGSSPYWGQGTLVTVSS

SEQ ID NO: 33921 - protein, 114 aa, Artificial Sequence; identical to SEQ ID NO: 33651
  Description of Artificial Sequence: Synthetic polypeptide
  VL of XENP023785

SEQ ID NO: 33922 - protein, 5 aa, Artificial Sequence
  Description of Artificial Sequence: Synthetic peptide
  XENP023785 vhCDR1
HYGMN

SEQ ID NO: 33923 - protein, 17 aa, Artificial Sequence
  Description of Artificial Sequence: Synthetic peptide
  XENP023785 vhCDR2
WINTYTGEPTYADGFTG

SEQ ID NO: 33924 - protein, 8 aa, Artificial Sequence
  Description of Artificial Sequence: Synthetic peptide
  XENP023785 vhCDR3
DYYGSSPY

SEQ ID NO: 33925 - protein, 16 aa, Artificial Sequence
  Description of Artificial Sequence: Synthetic peptide
  XENP023785 vlCDR1
KSSQSIVHSNGNTYLE

SEQ ID NO: 33926 - protein, 7 aa, Artificial Sequence
  Description of Artificial Sequence: Synthetic peptide
  XENP023785 vlCDR2
KVSNRFS

SEQ ID NO: 33927 - protein, 9 aa, Artificial Sequence
  Description of Artificial Sequence: Synthetic peptide
  XENP023785 vlCDR3
FQGSHVPNT

SEQ ID NO: 33928 - protein, 251 aa, Artificial Sequence
  Description of Artificial Sequence: Synthetic polypeptide
  XENP023786 1C11_H3.50_L3_scFv
QIQLVQSGSELKKPGASVKVSCKASGYTFTHYGMNWVRQAPGQGLEWMGWINTYTGEPTYADGFTGRFVFSADTSVSTAYLQISSLKAEDTAVYFCARDYYGSSPYWGQGTLVTVSSGKPGSGKPGSGKPGSGKPGSDVLMTQSPDSLAVSLGERATINCKSSQSIVHSNGNTYLEWYQQKPGQSPKLLIYKVSNRFSGVPDRFSGSGSGTDFTLTISSLQAEDVAVYYCFQGSHVPNTFGGGTKVEIKGS

SEQ ID NO: 33929 - protein, 117 aa, Artificial Sequence
  Description of Artificial Sequence: Synthetic polypeptide
  VH of XENP023786
QIQLVQSGSELKKPGASVKVSCKASGYTFTHYGMNWVRQAPGQGLEWMGWINTYTGEPTYADGFTGRFVFSADTSVSTAYLQISSLKAEDTAVYFCARDYYGSSPYWGQGTLVTVSS

SEQ ID NO: 33930 - protein, 114 aa, Artificial Sequence; identical to SEQ ID NO: 33651
  Description of Artificial Sequence: Synthetic polypeptide
  VL of XENP023786

SEQ ID NO: 33931 - protein, 5 aa, Artificial Sequence
  Description of Artificial Sequence: Synthetic peptide
  XENP023786 vhCDR1
HYGMN

SEQ ID NO: 33932 - protein, 17 aa, Artificial Sequence
  Description of Artificial Sequence: Synthetic peptide
  XENP023786 vhCDR2
WINTYTGEPTYADGFTG

SEQ ID NO: 33933 - protein, 8 aa, Artificial Sequence
  Description of Artificial Sequence: Synthetic peptide
  XENP023786 vhCDR3
DYYGSSPY

SEQ ID NO: 33934 - protein, 16 aa, Artificial Sequence
  Description of Artificial Sequence: Synthetic peptide
  XENP023786 vlCDR1
KSSQSIVHSNGNTYLE

SEQ ID NO: 33935 - protein, 7 aa, Artificial Sequence
  Description of Artificial Sequence: Synthetic peptide
  XENP023786 vlCDR2
KVSNRFS

SEQ ID NO: 33936 - protein, 9 aa, Artificial Sequence
  Description of Artificial Sequence: Synthetic peptide
  XENP023786 vlCDR3
FQGSHVPNT

SEQ ID NO: 33937 - protein, 251 aa, Artificial Sequence
  Description of Artificial Sequence: Synthetic polypeptide
  XENP023787 1C11_H3.51_L3_scFv
QIQLVQSGSELKKPGASVKVSCKASGYTFTHYGMNWVRQAPGQGLEWMGWINTYTGEPTYADGFTGRFVFSVDTSVSTAYLQISSLKAEDTAVYFCARDYYGSSPYWGQGTLVTVSSGKPGSGKPGSGKPGSGKPGSDVLMTQSPDSLAVSLGERATINCKSSQSIVHSNGNTYLEWYQQKPGQSPKLLIYKVSNRFSGVPDRFSGSGSGTDFTLTISSLQAEDVAVYYCFQGSHVPNTFGGGTKVEIKGS

SEQ ID NO: 33938 - protein, 117 aa, Artificial Sequence
  Description of Artificial Sequence: Synthetic polypeptide
  VH of XENP023787
QIQLVQSGSELKKPGASVKVSCKASGYTFTHYGMNWVRQAPGQGLEWMGWINTYTGEPTYADGFTGRFVFSVDTSVSTAYLQISSLKAEDTAVYFCARDYYGSSPYWGQGTLVTVSS

SEQ ID NO: 33939 - protein, 114 aa, Artificial Sequence; identical to SEQ ID NO: 33651
  Description of Artificial Sequence: Synthetic polypeptide
  VL of XENP023787

SEQ ID NO: 33940 - protein, 5 aa, Artificial Sequence
  Description of Artificial Sequence: Synthetic peptide
  XENP023787 vhCDR1
HYGMN

SEQ ID NO: 33941 - protein, 17 aa, Artificial Sequence
  Description of Artificial Sequence: Synthetic peptide
  XENP023787 vhCDR2
WINTYTGEPTYADGFTG

SEQ ID NO: 33942 - protein, 8 aa, Artificial Sequence
  Description of Artificial Sequence: Synthetic peptide
  XENP023787 vhCDR3
DYYGSSPY

SEQ ID NO: 33943 - protein, 16 aa, Artificial Sequence
  Description of Artificial Sequence: Synthetic peptide
  XENP023787 vlCDR1
KSSQSIVHSNGNTYLE

SEQ ID NO: 33944 - protein, 7 aa, Artificial Sequence
  Description of Artificial Sequence: Synthetic peptide
  XENP023787 vlCDR2
KVSNRFS

SEQ ID NO: 33945 - protein, 9 aa, Artificial Sequence
  Description of Artificial Sequence: Synthetic peptide
  XENP023787 vlCDR3
FQGSHVPNT

SEQ ID NO: 33946 - protein, 251 aa, Artificial Sequence
  Description of Artificial Sequence: Synthetic polypeptide
  XENP023788 1C11_H3.54_L3_scFv
QIQLVQSGSELKKPGASVKVSCKASGYTFTHYGMNWVRQAPGQGLEWMGWINTYTGEPTYADGFTGRVTMTADTSVSTAYLQISSLKAEDTAVYFCARDYYGSSPYWGQGTLVTVSSGKPGSGKPGSGKPGSGKPGSDVLMTQSPDSLAVSLGERATINCKSSQSIVHSNGNTYLEWYQQKPGQSPKLLIYKVSNRFSGVPDRFSGSGSGTDFTLTISSLQAEDVAVYYCFQGSHVPNTFGGGTKVEIKGS

SEQ ID NO: 33947 - protein, 117 aa, Artificial Sequence
  Description of Artificial Sequence: Synthetic polypeptide
  VH of XENP023788
QIQLVQSGSELKKPGASVKVSCKASGYTFTHYGMNWVRQAPGQGLEWMGWINTYTGEPTYADGFTGRVTMTADTSVSTAYLQISSLKAEDTAVYFCARDYYGSSPYWGQGTLVTVSS

SEQ ID NO: 33948 - protein, 114 aa, Artificial Sequence; identical to SEQ ID NO: 33651
  Description of Artificial Sequence: Synthetic polypeptide
  VL of XENP023788

SEQ ID NO: 33949 - protein, 5 aa, Artificial Sequence
  Description of Artificial Sequence: Synthetic peptide
  XENP023788 vhCDR1
HYGMN

SEQ ID NO: 33950 - protein, 17 aa, Artificial Sequence
  Description of Artificial Sequence: Synthetic peptide
  XENP023788 vhCDR2
WINTYTGEPTYADGFTG

SEQ ID NO: 33951 - protein, 8 aa, Artificial Sequence
  Description of Artificial Sequence: Synthetic peptide
  XENP023788 vhCDR3
DYYGSSPY

SEQ ID NO: 33952 - protein, 16 aa, Artificial Sequence
  Description of Artificial Sequence: Synthetic peptide
  XENP023788 vlCDR1
KSSQSIVHSNGNTYLE

SEQ ID NO: 33953 - protein, 7 aa, Artificial Sequence
  Description of Artificial Sequence: Synthetic peptide
  XENP023788 vlCDR2
KVSNRFS

SEQ ID NO: 33954 - protein, 9 aa, Artificial Sequence
  Description of Artificial Sequence: Synthetic peptide
  XENP023788 vlCDR3
FQGSHVPNT

SEQ ID NO: 33955 - protein, 251 aa, Artificial Sequence
  Description of Artificial Sequence: Synthetic polypeptide
  XENP023789 1C11_H3.55_L3_scFv
QIQLVQSGSELKKPGASVKVSCKASGYTFTHYGMNWVRQAPGQGLEWMGWINTYTGEPTYADGFTGRFVFSLDKSVSTAYLQISSLKAEDTAVYFCARDYYGSSPYWGQGTLVTVSSGKPGSGKPGSGKPGSGKPGSDVLMTQSPDSLAVSLGERATINCKSSQSIVHSNGNTYLEWYQQKPGQSPKLLIYKVSNRFSGVPDRFSGSGSGTDFTLTISSLQAEDVAVYYCFQGSHVPNTFGGGTKVEIKGS

SEQ ID NO: 33956 - protein, 117 aa, Artificial Sequence
  Description of Artificial Sequence: Synthetic polypeptide
  VH of XENP023789
QIQLVQSGSELKKPGASVKVSCKASGYTFTHYGMNWVRQAPGQGLEWMGWINTYTGEPTYADGFTGRFVFSLDKSVSTAYLQISSLKAEDTAVYFCARDYYGSSPYWGQGTLVTVSS

SEQ ID NO: 33957 - protein, 114 aa, Artificial Sequence; identical to SEQ ID NO: 33651
  Description of Artificial Sequence: Synthetic polypeptide
  VL of XENP023789

SEQ ID NO: 33958 - protein, 5 aa, Artificial Sequence
  Description of Artificial Sequence: Synthetic peptide
  XENP023789 vhCDR1
HYGMN

SEQ ID NO: 33959 - protein, 17 aa, Artificial Sequence
  Description of Artificial Sequence: Synthetic peptide
  XENP023789 vhCDR2
WINTYTGEPTYADGFTG

SEQ ID NO: 33960 - protein, 8 aa, Artificial Sequence
  Description of Artificial Sequence: Synthetic peptide
  XENP023789 vhCDR3
DYYGSSPY

SEQ ID NO: 33961 - protein, 16 aa, Artificial Sequence
  Description of Artificial Sequence: Synthetic peptide
  XENP023789 vlCDR1
KSSQSIVHSNGNTYLE

SEQ ID NO: 33962 - protein, 7 aa, Artificial Sequence
  Description of Artificial Sequence: Synthetic peptide
  XENP023789 vlCDR2
KVSNRFS

SEQ ID NO: 33963 - protein, 9 aa, Artificial Sequence
  Description of Artificial Sequence: Synthetic peptide
  XENP023789 vlCDR3
FQGSHVPNT

SEQ ID NO: 33964 - protein, 251 aa, Artificial Sequence
  Description of Artificial Sequence: Synthetic polypeptide
  XENP023790 1C11_H3.56_L3_scFv
QIQLVQSGSELKKPGASVKVSCKASGYTFTHYGMNWVRQAPGQGLEWMGWINTYTGEPTYADGFTGRFVFSLDTSASTAYLQISSLKAEDTAVYFCARDYYGSSPYWGQGTLVTVSSGKPGSGKPGSGKPGSGKPGSDVLMTQSPDSLAVSLGERATINCKSSQSIVHSNGNTYLEWYQQKPGQSPKLLIYKVSNRFSGVPDRFSGSGSGTDFTLTISSLQAEDVAVYYCFQGSHVPNTFGGGTKVEIKGS

SEQ ID NO: 33965 - protein, 117 aa, Artificial Sequence
  Description of Artificial Sequence: Synthetic polypeptide
  VH of XENP023790
QIQLVQSGSELKKPGASVKVSCKASGYTFTHYGMNWVRQAPGQGLEWMGWINTYTGEPTYADGFTGRFVFSLDTSASTAYLQISSLKAEDTAVYFCARDYYGSSPYWGQGTLVTVSS

SEQ ID NO: 33966 - protein, 114 aa, Artificial Sequence; identical to SEQ ID NO: 33651
  Description of Artificial Sequence: Synthetic polypeptide
  VL of XENP023790

SEQ ID NO: 33967 - protein, 5 aa, Artificial Sequence
  Description of Artificial Sequence: Synthetic peptide
  XENP023790 vhCDR1
HYGMN

SEQ ID NO: 33968 - protein, 17 aa, Artificial Sequence
  Description of Artificial Sequence: Synthetic peptide
  XENP023790 vhCDR2
WINTYTGEPTYADGFTG

SEQ ID NO: 33969 - protein, 8 aa, Artificial Sequence
  Description of Artificial Sequence: Synthetic peptide
  XENP023790 vhCDR3
DYYGSSPY

SEQ ID NO: 33970 - protein, 16 aa, Artificial Sequence
  Description of Artificial Sequence: Synthetic peptide
  XENP023790 vlCDR1
KSSQSIVHSNGNTYLE

SEQ ID NO: 33971 - protein, 7 aa, Artificial Sequence
  Description of Artificial Sequence: Synthetic peptide
  XENP023790 vlCDR2
KVSNRFS

SEQ ID NO: 33972 - protein, 9 aa, Artificial Sequence
  Description of Artificial Sequence: Synthetic peptide
  XENP023790 vlCDR3
FQGSHVPNT

SEQ ID NO: 33973 - protein, 251 aa, Artificial Sequence
  Description of Artificial Sequence: Synthetic polypeptide
  XENP023791 1C11_H3.57_L3_scFv
QIQLVQSGSELKKPGASVKVSCKASGYTFTHYGMNWVRQAPGQGLEWMGWINTYTGEPTYADGFTGRFVFSLDTSISTAYLQISSLKAEDTAVYFCARDYYGSSPYWGQGTLVTVSSGKPGSGKPGSGKPGSGKPGSDVLMTQSPDSLAVSLGERATINCKSSQSIVHSNGNTYLEWYQQKPGQSPKLLIYKVSNRFSGVPDRFSGSGSGTDFTLTISSLQAEDVAVYYCFQGSHVPNTFGGGTKVEIKGS

SEQ ID NO: 33974 - protein, 117 aa, Artificial Sequence
  Description of Artificial Sequence: Synthetic polypeptide
  VH of XENP023791
QIQLVQSGSELKKPGASVKVSCKASGYTFTHYGMNWVRQAPGQGLEWMGWINTYTGEPTYADGFTGRFVFSLDTSISTAYLQISSLKAEDTAVYFCARDYYGSSPYWGQGTLVTVSS

SEQ ID NO: 33975 - protein, 114 aa, Artificial Sequence; identical to SEQ ID NO: 33651
  Description of Artificial Sequence: Synthetic polypeptide
  VL of XENP023791

SEQ ID NO: 33976 - protein, 5 aa, Artificial Sequence
  Description of Artificial Sequence: Synthetic peptide
  XENP023791 vhCDR1
HYGMN

SEQ ID NO: 33977 - protein, 17 aa, Artificial Sequence
  Description of Artificial Sequence: Synthetic peptide
  XENP023791 vhCDR2
WINTYTGEPTYADGFTG

SEQ ID NO: 33978 - protein, 8 aa, Artificial Sequence
  Description of Artificial Sequence: Synthetic peptide
  XENP023791 vhCDR3
DYYGSSPY

SEQ ID NO: 33979 - protein, 16 aa, Artificial Sequence
  Description of Artificial Sequence: Synthetic peptide
  XENP023791 vlCDR1
KSSQSIVHSNGNTYLE

SEQ ID NO: 33980 - protein, 7 aa, Artificial Sequence
  Description of Artificial Sequence: Synthetic peptide
  XENP023791 vlCDR2
KVSNRFS

SEQ ID NO: 33981 - protein, 9 aa, Artificial Sequence
  Description of Artificial Sequence: Synthetic peptide
  XENP023791 vlCDR3
FQGSHVPNT

SEQ ID NO: 33982 - protein, 251 aa, Artificial Sequence
  Description of Artificial Sequence: Synthetic polypeptide
  XENP023792 1C11_H3.58_L3_scFv
QIQLVQSGSELKKPGASVKVSCKASGYTFTHYGMNWVRQAPGQGLEWMGWINTYTGEPTYADGFTGRFVFSLDTSKSTAYLQISSLKAEDTAVYFCARDYYGSSPYWGQGTLVTVSSGKPGSGKPGSGKPGSGKPGSDVLMTQSPDSLAVSLGERATINCKSSQSIVHSNGNTYLEWYQQKPGQSPKLLIYKVSNRFSGVPDRFSGSGSGTDFTLTISSLQAEDVAVYYCFQGSHVPNTFGGGTKVEIKGS

SEQ ID NO: 33983 - protein, 117 aa, Artificial Sequence
  Description of Artificial Sequence: Synthetic polypeptide
  VH of XENP023792
QIQLVQSGSELKKPGASVKVSCKASGYTFTHYGMNWVRQAPGQGLEWMGWINTYTGEPTYADGFTGRFVFSLDTSKSTAYLQISSLKAEDTAVYFCARDYYGSSPYWGQGTLVTVSS

SEQ ID NO: 33984 - protein, 114 aa, Artificial Sequence; identical to SEQ ID NO: 33651
  Description of Artificial Sequence: Synthetic polypeptide
  VL of XENP023792

SEQ ID NO: 33985 - protein, 5 aa, Artificial Sequence
  Description of Artificial Sequence: Synthetic peptide
  XENP023792 vhCDR1
HYGMN

SEQ ID NO: 33986 - protein, 17 aa, Artificial Sequence
  Description of Artificial Sequence: Synthetic peptide
  XENP023792 vhCDR2
WINTYTGEPTYADGFTG

SEQ ID NO: 33987 - protein, 8 aa, Artificial Sequence
  Description of Artificial Sequence: Synthetic peptide
  XENP023792 vhCDR3
DYYGSSPY

SEQ ID NO: 33988 - protein, 16 aa, Artificial Sequence
  Description of Artificial Sequence: Synthetic peptide
  XENP023792 vlCDR1
KSSQSIVHSNGNTYLE

SEQ ID NO: 33989 - protein, 7 aa, Artificial Sequence
  Description of Artificial Sequence: Synthetic peptide
  XENP023792 vlCDR2
KVSNRFS

SEQ ID NO: 33990 - protein, 9 aa, Artificial Sequence
  Description of Artificial Sequence: Synthetic peptide
  XENP023792 vlCDR3
FQGSHVPNT

SEQ ID NO: 33991 - protein, 251 aa, Artificial Sequence
  Description of Artificial Sequence: Synthetic polypeptide
  XENP023793 1C11_H3.59_L3_scFv
QIQLVQSGSELKKPGASVKVSCKASGYTFTHYGMNWVRQAPGQGLEWMGWINTYTGEPTYADGFTGRFVFSLDTSQSTAYLQISSLKAEDTAVYFCARDYYGSSPYWGQGTLVTVSSGKPGSGKPGSGKPGSGKPGSDVLMTQSPDSLAVSLGERATINCKSSQSIVHSNGNTYLEWYQQKPGQSPKLLIYKVSNRFSGVPDRFSGSGSGTDFTLTISSLQAEDVAVYYCFQGSHVPNTFGGGTKVEIKGS

SEQ ID NO: 33992 - protein, 117 aa, Artificial Sequence
  Description of Artificial Sequence: Synthetic polypeptide
  VH of XENP023793
QIQLVQSGSELKKPGASVKVSCKASGYTFTHYGMNWVRQAPGQGLEWMGWINTYTGEPTYADGFTGRFVFSLDTSQSTAYLQISSLKAEDTAVYFCARDYYGSSPYWGQGTLVTVSS

SEQ ID NO: 33993 - protein, 114 aa, Artificial Sequence; identical to SEQ ID NO: 33651
  Description of Artificial Sequence: Synthetic polypeptide
  VL of XENP023793

SEQ ID NO: 33994 - protein, 5 aa, Artificial Sequence
  Description of Artificial Sequence: Synthetic peptide
  XENP023793 vhCDR1
HYGMN

SEQ ID NO: 33995 - protein, 17 aa, Artificial Sequence
  Description of Artificial Sequence: Synthetic peptide
  XENP023793 vhCDR2
WINTYTGEPTYADGFTG

SEQ ID NO: 33996 - protein, 8 aa, Artificial Sequence
  Description of Artificial Sequence: Synthetic peptide
  XENP023793 vhCDR3
DYYGSSPY

SEQ ID NO: 33997 - protein, 16 aa, Artificial Sequence
  Description of Artificial Sequence: Synthetic peptide
  XENP023793 vlCDR1
KSSQSIVHSNGNTYLE

SEQ ID NO: 33998 - protein, 7 aa, Artificial Sequence
  Description of Artificial Sequence: Synthetic peptide
  XENP023793 vlCDR2
KVSNRFS

SEQ ID NO: 33999 - protein, 9 aa, Artificial Sequence
  Description of Artificial Sequence: Synthetic peptide
  XENP023793 vlCDR3
FQGSHVPNT

SEQ ID NO: 34000 - protein, 251 aa, Artificial Sequence
  Description of Artificial Sequence: Synthetic polypeptide
  XENP023794 1C11_H3.60_L3_scFv
QIQLVQSGSELKKPGASVKVSCKASGYTFTHYGMNWVRQAPGQGLEWMGWINTYTGEPTYADGFTGRFVFSLDTSTSTAYLQISSLKAEDTAVYFCARDYYGSSPYWGQGTLVTVSSGKPGSGKPGSGKPGSGKPGSDVLMTQSPDSLAVSLGERATINCKSSQSIVHSNGNTYLEWYQQKPGQSPKLLIYKVSNRFSGVPDRFSGSGSGTDFTLTISSLQAEDVAVYYCFQGSHVPNTFGGGTKVEIKGS

SEQ ID NO: 34001 - protein, 117 aa, Artificial Sequence
  Description of Artificial Sequence: Synthetic polypeptide
  VH of XENP023794
QIQLVQSGSELKKPGASVKVSCKASGYTFTHYGMNWVRQAPGQGLEWMGWINTYTGEPTYADGFTGRFVFSLDTSTSTAYLQISSLKAEDTAVYFCARDYYGSSPYWGQGTLVTVSS

SEQ ID NO: 34002 - protein, 114 aa, Artificial Sequence; identical to SEQ ID NO: 33651
  Description of Artificial Sequence: Synthetic polypeptide
  VL of XENP023794

SEQ ID NO: 34003 - protein, 5 aa, Artificial Sequence
  Description of Artificial Sequence: Synthetic peptide
  XENP023794 vhCDR1
HYGMN

SEQ ID NO: 34004 - protein, 17 aa, Artificial Sequence
  Description of Artificial Sequence: Synthetic peptide
  XENP023794 vhCDR2
WINTYTGEPTYADGFTG

SEQ ID NO: 34005 - protein, 8 aa, Artificial Sequence
  Description of Artificial Sequence: Synthetic peptide
  XENP023794 vhCDR3
DYYGSSPY

SEQ ID NO: 34006 - protein, 16 aa, Artificial Sequence
  Description of Artificial Sequence: Synthetic peptide
  XENP023794 vlCDR1
KSSQSIVHSNGNTYLE

SEQ ID NO: 34007 - protein, 7 aa, Artificial Sequence
  Description of Artificial Sequence: Synthetic peptide
  XENP023794 vlCDR2
KVSNRFS

SEQ ID NO: 34008 - protein, 9 aa, Artificial Sequence
  Description of Artificial Sequence: Synthetic peptide
  XENP023794 vlCDR3
FQGSHVPNT

SEQ ID NO: 34009 - protein, 251 aa, Artificial Sequence
  Description of Artificial Sequence: Synthetic polypeptide
  XENP023795 1C11_H3.61_L3_scFv
QIQLVQSGSELKKPGASVKVSCKASGYTFTHYGMNWVRQAPGQGLEWMGWINTYTGEPTYADGFTGRFVFSLDTSSSTAYLQISSLKAEDTAVYFCARDYYGSSPYWGQGTLVTVSSGKPGSGKPGSGKPGSGKPGSDVLMTQSPDSLAVSLGERATINCKSSQSIVHSNGNTYLEWYQQKPGQSPKLLIYKVSNRFSGVPDRFSGSGSGTDFTLTISSLQAEDVAVYYCFQGSHVPNTFGGGTKVEIKGS

SEQ ID NO: 34010 - protein, 117 aa, Artificial Sequence
  Description of Artificial Sequence: Synthetic polypeptide
  VH of XENP023795
QIQLVQSGSELKKPGASVKVSCKASGYTFTHYGMNWVRQAPGQGLEWMGWINTYTGEPTYADGFTGRFVFSLDTSSSTAYLQISSLKAEDTAVYFCARDYYGSSPYWGQGTLVTVSS

SEQ ID NO: 34011 - protein, 114 aa, Artificial Sequence; identical to SEQ ID NO: 33651
  Description of Artificial Sequence: Synthetic polypeptide
  VL of XENP023795

SEQ ID NO: 34012 - protein, 5 aa, Artificial Sequence
  Description of Artificial Sequence: Synthetic peptide
  XENP023795 vhCDR1
HYGMN

SEQ ID NO: 34013 - protein, 17 aa, Artificial Sequence
  Description of Artificial Sequence: Synthetic peptide
  XENP023795 vhCDR2
WINTYTGEPTYADGFTG

SEQ ID NO: 34014 - protein, 8 aa, Artificial Sequence
  Description of Artificial Sequence: Synthetic peptide
  XENP023795 vhCDR3
DYYGSSPY

SEQ ID NO: 34015 - protein, 16 aa, Artificial Sequence
  Description of Artificial Sequence: Synthetic peptide
  XENP023795 vlCDR1
KSSQSIVHSNGNTYLE

SEQ ID NO: 34016 - protein, 7 aa, Artificial Sequence
  Description of Artificial Sequence: Synthetic peptide
  XENP023795 vlCDR2
KVSNRFS

SEQ ID NO: 34017 - protein, 9 aa, Artificial Sequence
  Description of Artificial Sequence: Synthetic peptide
  XENP023795 vlCDR3
FQGSHVPNT

SEQ ID NO: 34018 - protein, 251 aa, Artificial Sequence
  Description of Artificial Sequence: Synthetic polypeptide
  XENP023796 1C11_H3.62_L3_scFv
QIQLVQSGSELKKPGASVKVSCKASGYTFTHYGMNWVRQAPGQGLEWMGWINTYTGEPTYADGFTGRFVFSLDTSVSTIYLQISSLKAEDTAVYFCARDYYGSSPYWGQGTLVTVSSGKPGSGKPGSGKPGSGKPGSDVLMTQSPDSLAVSLGERATINCKSSQSIVHSNGNTYLEWYQQKPGQSPKLLIYKVSNRFSGVPDRFSGSGSGTDFTLTISSLQAEDVAVYYCFQGSHVPNTFGGGTKVEIKGS

SEQ ID NO: 34019 - protein, 117 aa, Artificial Sequence
  Description of Artificial Sequence: Synthetic polypeptide
  VH of XENP023796
QIQLVQSGSELKKPGASVKVSCKASGYTFTHYGMNWVRQAPGQGLEWMGWINTYTGEPTYADGFTGRFVFSLDTSVSTIYLQISSLKAEDTAVYFCARDYYGSSPYWGQGTLVTVSS

SEQ ID NO: 34020 - protein, 114 aa, Artificial Sequence; identical to SEQ ID NO: 33651
  Description of Artificial Sequence: Synthetic polypeptide
  VL of XENP023796

SEQ ID NO: 34021 - protein, 5 aa, Artificial Sequence
  Description of Artificial Sequence: Synthetic peptide
  XENP023796 vhCDR1
HYGMN

SEQ ID NO: 34022 - protein, 17 aa, Artificial Sequence
  Description of Artificial Sequence: Synthetic peptide
  XENP023796 vhCDR2
WINTYTGEPTYADGFTG

SEQ ID NO: 34023 - protein, 8 aa, Artificial Sequence
  Description of Artificial Sequence: Synthetic peptide
  XENP023796 vhCDR3
DYYGSSPY

SEQ ID NO: 34024 - protein, 16 aa, Artificial Sequence
  Description of Artificial Sequence: Synthetic peptide
  XENP023796 vlCDR1
KSSQSIVHSNGNTYLE

SEQ ID NO: 34025 - protein, 7 aa, Artificial Sequence
  Description of Artificial Sequence: Synthetic peptide
  XENP023796 vlCDR2
KVSNRFS

SEQ ID NO: 34026 - protein, 9 aa, Artificial Sequence
  Description of Artificial Sequence: Synthetic peptide
  XENP023796 vlCDR3
FQGSHVPNT

SEQ ID NO: 34027 - protein, 251 aa, Artificial Sequence
  Description of Artificial Sequence: Synthetic polypeptide
  XENP023801 1C11_H3.64_L3_scFv
QIQLVQSGSELKKPGASVKVSCKASGYTFTHYGMNWVRQAPGQGLEWMGWINTYTGEPTYADGFTGRFVFSLDTSVSTVYLQISSLKAEDTAVYFCARDYYGSSPYWGQGTLVTVSSGKPGSGKPGSGKPGSGKPGSDVLMTQSPDSLAVSLGERATINCKSSQSIVHSNGNTYLEWYQQKPGQSPKLLIYKVSNRFSGVPDRFSGSGSGTDFTLTISSLQAEDVAVYYCFQGSHVPNTFGGGTKVEIKGS

SEQ ID NO: 34028 - protein, 117 aa, Artificial Sequence
  Description of Artificial Sequence: Synthetic polypeptide
  VH of XENP023801
QIQLVQSGSELKKPGASVKVSCKASGYTFTHYGMNWVRQAPGQGLEWMGWINTYTGEPTYADGFTGRFVFSLDTSVSTVYLQISSLKAEDTAVYFCARDYYGSSPYWGQGTLVTVSS

SEQ ID NO: 34029 - protein, 114 aa, Artificial Sequence; identical to SEQ ID NO: 33651
  Description of Artificial Sequence: Synthetic polypeptide
  VL of XENP023801

SEQ ID NO: 34030 - protein, 5 aa, Artificial Sequence
  Description of Artificial Sequence: Synthetic peptide
  XENP023801 vhCDR1
HYGMN

SEQ ID NO: 34031 - protein, 17 aa, Artificial Sequence
  Description of Artificial Sequence: Synthetic peptide
  XENP023801 vhCDR2
WINTYTGEPTYADGFTG

SEQ ID NO: 34032 - protein, 8 aa, Artificial Sequence
  Description of Artificial Sequence: Synthetic peptide
  XENP023801 vhCDR3
DYYGSSPY

SEQ ID NO: 34033 - protein, 16 aa, Artificial Sequence
  Description of Artificial Sequence: Synthetic peptide
  XENP023801 vlCDR1
KSSQSIVHSNGNTYLE

SEQ ID NO: 34034 - protein, 7 aa, Artificial Sequence
  Description of Artificial Sequence: Synthetic peptide
  XENP023801 vlCDR2
KVSNRFS

SEQ ID NO: 34035 - protein, 9 aa, Artificial Sequence
  Description of Artificial Sequence: Synthetic peptide
  XENP023801 vlCDR3
FQGSHVPNT

SEQ ID NO: 34036 - protein, 251 aa, Artificial Sequence
  Description of Artificial Sequence: Synthetic polypeptide
  XENP023802 1C11_H3.65_L3_scFv
QIQLVQSGSELKKPGASVKVSCKASGYTFTHYGMNWVRQAPGQGLEWMGWINTYTGEPTYADGFTGRFVFSLDTSVSTAYMQISSLKAEDTAVYFCARDYYGSSPYWGQGTLVTVSSGKPGSGKPGSGKPGSGKPGSDVLMTQSPDSLAVSLGERATINCKSSQSIVHSNGNTYLEWYQQKPGQSPKLLIYKVSNRFSGVPDRFSGSGSGTDFTLTISSLQAEDVAVYYCFQGSHVPNTFGGGTKVEIKGS

SEQ ID NO: 34037 - protein, 117 aa, Artificial Sequence
  Description of Artificial Sequence: Synthetic polypeptide
  VH of XENP023802
QIQLVQSGSELKKPGASVKVSCKASGYTFTHYGMNWVRQAPGQGLEWMGWINTYTGEPTYADGFTGRFVFSLDTSVSTAYMQISSLKAEDTAVYFCARDYYGSSPYWGQGTLVTVSS

SEQ ID NO: 34038 - protein, 114 aa, Artificial Sequence; identical to SEQ ID NO: 33651
  Description of Artificial Sequence: Synthetic polypeptide
  VL of XENP023802

SEQ ID NO: 34039 - protein, 5 aa, Artificial Sequence
  Description of Artificial Sequence: Synthetic peptide
  XENP023802 vhCDR1
HYGMN

SEQ ID NO: 34040 - protein, 17 aa, Artificial Sequence
  Description of Artificial Sequence: Synthetic peptide
  XENP023802 vhCDR2
WINTYTGEPTYADGFTG

SEQ ID NO: 34041 - protein, 8 aa, Artificial Sequence
  Description of Artificial Sequence: Synthetic peptide
  XENP023802 vhCDR3
DYYGSSPY

SEQ ID NO: 34042 - protein, 16 aa, Artificial Sequence
  Description of Artificial Sequence: Synthetic peptide
  XENP023802 vlCDR1
KSSQSIVHSNGNTYLE

SEQ ID NO: 34043 - protein, 7 aa, Artificial Sequence
  Description of Artificial Sequence: Synthetic peptide
  XENP023802 vlCDR2
KVSNRFS

SEQ ID NO: 34044 - protein, 9 aa, Artificial Sequence
  Description of Artificial Sequence: Synthetic peptide
  XENP023802 vlCDR3
FQGSHVPNT

SEQ ID NO: 34045 - protein, 251 aa, Artificial Sequence
  Description of Artificial Sequence: Synthetic polypeptide
  XENP023803 1C11_H3.66_L3_scFv
QIQLVQSGSELKKPGASVKVSCKASGYTFTHYGMNWVRQAPGQGLEWMGWINTYTGEPTYADGFTGRFVFSLDTSVSTAYMELSSLKAEDTAVYFCARDYYGSSPYWGQGTLVTVSSGKPGSGKPGSGKPGSGKPGSDVLMTQSPDSLAVSLGERATINCKSSQSIVHSNGNTYLEWYQQKPGQSPKLLIYKVSNRFSGVPDRFSGSGSGTDFTLTISSLQAEDVAVYYCFQGSHVPNTFGGGTKVEIKGS

SEQ ID NO: 34046 - protein, 117 aa, Artificial Sequence
  Description of Artificial Sequence: Synthetic polypeptide
  VH of XENP023803
QIQLVQSGSELKKPGASVKVSCKASGYTFTHYGMNWVRQAPGQGLEWMGWINTYTGEPTYADGFTGRFVFSLDTSVSTAYMELSSLKAEDTAVYFCARDYYGSSPYWGQGTLVTVSS

SEQ ID NO: 34047 - protein, 114 aa, Artificial Sequence; identical to SEQ ID NO: 33651
  Description of Artificial Sequence: Synthetic polypeptide
  VL of XENP023803

SEQ ID NO: 34048 - protein, 5 aa, Artificial Sequence
  Description of Artificial Sequence: Synthetic peptide
  XENP023803 vhCDR1
HYGMN

SEQ ID NO: 34049 - protein, 17 aa, Artificial Sequence
  Description of Artificial Sequence: Synthetic peptide
  XENP023803 vhCDR2
WINTYTGEPTYADGFTG

SEQ ID NO: 34050 - protein, 8 aa, Artificial Sequence
  Description of Artificial Sequence: Synthetic peptide
  XENP023803 vhCDR3
DYYGSSPY

SEQ ID NO: 34051 - protein, 16 aa, Artificial Sequence
  Description of Artificial Sequence: Synthetic peptide
  XENP023803 vlCDR1
KSSQSIVHSNGNTYLE

SEQ ID NO: 34052 - protein, 7 aa, Artificial Sequence
  Description of Artificial Sequence: Synthetic peptide
  XENP023803 vlCDR2
KVSNRFS

SEQ ID NO: 34053 - protein, 9 aa, Artificial Sequence
  Description of Artificial Sequence: Synthetic peptide
  XENP023803 vlCDR3
FQGSHVPNT

SEQ ID NO: 34054 - protein, 251 aa, Artificial Sequence
  Description of Artificial Sequence: Synthetic polypeptide
  XENP023804 1C11_H3.67_L3_scFv
QIQLVQSGSELKKPGASVKVSCKASGYTFTHYGMNWVRQAPGQGLEWMGWINTYTGEPTYADGFTGRFVFSLDTSVSTAYLQLSSLKAEDTAVYFCARDYYGSSPYWGQGTLVTVSSGKPGSGKPGSGKPGSGKPGSDVLMTQSPDSLAVSLGERATINCKSSQSIVHSNGNTYLEWYQQKPGQSPKLLIYKVSNRFSGVPDRFSGSGSGTDFTLTISSLQAEDVAVYYCFQGSHVPNTFGGGTKVEIKGS

SEQ ID NO: 34055 - protein, 117 aa, Artificial Sequence
  Description of Artificial Sequence: Synthetic polypeptide
  VH of XENP023804
QIQLVQSGSELKKPGASVKVSCKASGYTFTHYGMNWVRQAPGQGLEWMGWINTYTGEPTYADGFTGRFVFSLDTSVSTAYLQLSSLKAEDTAVYFCARDYYGSSPYWGQGTLVTVSS

SEQ ID NO: 34056 - protein, 114 aa, Artificial Sequence; identical to SEQ ID NO: 33651
  Description of Artificial Sequence: Synthetic polypeptide
  VL of XENP023804

SEQ ID NO: 34057 - protein, 5 aa, Artificial Sequence
  Description of Artificial Sequence: Synthetic peptide
  XENP023804 vhCDR1
HYGMN

SEQ ID NO: 34058 - protein, 17 aa, Artificial Sequence
  Description of Artificial Sequence: Synthetic peptide
  XENP023804 vhCDR2
WINTYTGEPTYADGFTG

SEQ ID NO: 34059 - protein, 8 aa, Artificial Sequence
  Description of Artificial Sequence: Synthetic peptide
  XENP023804 vhCDR3
DYYGSSPY

SEQ ID NO: 34060 - protein, 16 aa, Artificial Sequence
  Description of Artificial Sequence: Synthetic peptide
  XENP023804 vlCDR1
KSSQSIVHSNGNTYLE

SEQ ID NO: 34061 - protein, 7 aa, Artificial Sequence
  Description of Artificial Sequence: Synthetic peptide
  XENP023804 vlCDR2
KVSNRFS

SEQ ID NO: 34062 - protein, 9 aa, Artificial Sequence
  Description of Artificial Sequence: Synthetic peptide
  XENP023804 vlCDR3
FQGSHVPNT

SEQ ID NO: 34063 - protein, 251 aa, Artificial Sequence
  Description of Artificial Sequence: Synthetic polypeptide
  XENP023805 1C11_H3.68_L3_scFv
QIQLVQSGSELKKPGASVKVSCKASGYTFTHYGMNWVRQAPGQGLEWMGWINTYTGEPTYADGFTGRFVFSLDTSVSTAYLQMSSLKAEDTAVYFCARDYYGSSPYWGQGTLVTVSSGKPGSGKPGSGKPGSGKPGSDVLMTQSPDSLAVSLGERATINCKSSQSIVHSNGNTYLEWYQQKPGQSPKLLIYKVSNRFSGVPDRFSGSGSGTDFTLTISSLQAEDVAVYYCFQGSHVPNTFGGGTKVEIKGS

SEQ ID NO: 34064 - protein, 117 aa, Artificial Sequence
  Description of Artificial Sequence: Synthetic polypeptide
  VH of XENP023805
QIQLVQSGSELKKPGASVKVSCKASGYTFTHYGMNWVRQAPGQGLEWMGWINTYTGEPTYADGFTGRFVFSLDTSVSTAYLQMSSLKAEDTAVYFCARDYYGSSPYWGQGTLVTVSS

SEQ ID NO: 34065 - protein, 114 aa, Artificial Sequence; identical to SEQ ID NO: 33651
  Description of Artificial Sequence: Synthetic polypeptide
  VL of XENP023805

SEQ ID NO: 34066 - protein, 5 aa, Artificial Sequence
  Description of Artificial Sequence: Synthetic peptide
  XENP023805 vhCDR1
HYGMN

SEQ ID NO: 34067 - protein, 17 aa, Artificial Sequence
  Description of Artificial Sequence: Synthetic peptide
  XENP023805 vhCDR2
WINTYTGEPTYADGFTG

SEQ ID NO: 34068 - protein, 8 aa, Artificial Sequence
  Description of Artificial Sequence: Synthetic peptide
  XENP023805 vhCDR3
DYYGSSPY

SEQ ID NO: 34069 - protein, 16 aa, Artificial Sequence
  Description of Artificial Sequence: Synthetic peptide
  XENP023805 vlCDR1
KSSQSIVHSNGNTYLE

SEQ ID NO: 34070 - protein, 7 aa, Artificial Sequence
  Description of Artificial Sequence: Synthetic peptide
  XENP023805 vlCDR2
KVSNRFS

SEQ ID NO: 34071 - protein, 9 aa, Artificial Sequence
  Description of Artificial Sequence: Synthetic peptide
  XENP023805 vlCDR3
FQGSHVPNT

SEQ ID NO: 34072 - protein, 251 aa, Artificial Sequence
  Description of Artificial Sequence: Synthetic polypeptide
  XENP023806 1C11_H3.69_L3_scFv
QIQLVQSGSELKKPGASVKVSCKASGYTFTHYGMNWVRQAPGQGLEWMGWINTYTGEPTYADGFTGRFVFSLDTSVSTAYLQWSSLKAEDTAVYFCARDYYGSSPYWGQGTLVTVSSGKPGSGKPGSGKPGSGKPGSDVLMTQSPDSLAVSLGERATINCKSSQSIVHSNGNTYLEWYQQKPGQSPKLLIYKVSNRFSGVPDRFSGSGSGTDFTLTISSLQAEDVAVYYCFQGSHVPNTFGGGTKVEIKGS

SEQ ID NO: 34073 - protein, 117 aa, Artificial Sequence
  Description of Artificial Sequence: Synthetic polypeptide
  VH of XENP023806
QIQLVQSGSELKKPGASVKVSCKASGYTFTHYGMNWVRQAPGQGLEWMGWINTYTGEPTYADGFTGRFVFSLDTSVSTAYLQWSSLKAEDTAVYFCARDYYGSSPYWGQGTLVTVSS

SEQ ID NO: 34074 - protein, 114 aa, Artificial Sequence; identical to SEQ ID NO: 33651
  Description of Artificial Sequence: Synthetic polypeptide
  VL of XENP023806

SEQ ID NO: 34075 - protein, 5 aa, Artificial Sequence
  Description of Artificial Sequence: Synthetic peptide
  XENP023806 vhCDR1
HYGMN

SEQ ID NO: 34076 - protein, 17 aa, Artificial Sequence
  Description of Artificial Sequence: Synthetic peptide
  XENP023806 vhCDR2
WINTYTGEPTYADGFTG

SEQ ID NO: 34077 - protein, 8 aa, Artificial Sequence
  Description of Artificial Sequence: Synthetic peptide
  XENP023806 vhCDR3
DYYGSSPY

SEQ ID NO: 34078 - protein, 16 aa, Artificial Sequence
  Description of Artificial Sequence: Synthetic peptide
  XENP023806 vlCDR1
KSSQSIVHSNGNTYLE

SEQ ID NO: 34079 - protein, 7 aa, Artificial Sequence
  Description of Artificial Sequence: Synthetic peptide
  XENP023806 vlCDR2
KVSNRFS

SEQ ID NO: 34080 - protein, 9 aa, Artificial Sequence
  Description of Artificial Sequence: Synthetic peptide
  XENP023806 vlCDR3
FQGSHVPNT

SEQ ID NO: 34081 - protein, 251 aa, Artificial Sequence
  Description of Artificial Sequence: Synthetic polypeptide
  XENP023807 1C11_H3.70_L3_scFv
QIQLVQSGSELKKPGASVKVSCKASGYTFTHYGMNWVRQAPGQGLEWMGWINTYTGEPTYADGFTGRFVFSLDTSVSTAYLQVSSLKAEDTAVYFCARDYYGSSPYWGQGTLVTVSSGKPGSGKPGSGKPGSGKPGSDVLMTQSPDSLAVSLGERATINCKSSQSIVHSNGNTYLEWYQQKPGQSPKLLIYKVSNRFSGVPDRFSGSGSGTDFTLTISSLQAEDVAVYYCFQGSHVPNTFGGGTKVEIKGS

SEQ ID NO: 34082 - protein, 117 aa, Artificial Sequence
  Description of Artificial Sequence: Synthetic polypeptide
  VH of XENP023807
QIQLVQSGSELKKPGASVKVSCKASGYTFTHYGMNWVRQAPGQGLEWMGWINTYTGEPTYADGFTGRFVFSLDTSVSTAYLQVSSLKAEDTAVYFCARDYYGSSPYWGQGTLVTVSS

SEQ ID NO: 34083 - protein, 114 aa, Artificial Sequence; identical to SEQ ID NO: 33651
  Description of Artificial Sequence: Synthetic polypeptide
  VL of XENP023807

SEQ ID NO: 34084 - protein, 5 aa, Artificial Sequence
  Description of Artificial Sequence: Synthetic peptide
  XENP023807 vhCDR1
HYGMN

SEQ ID NO: 34085 - protein, 17 aa, Artificial Sequence
  Description of Artificial Sequence: Synthetic peptide
  XENP023807 vhCDR2
WINTYTGEPTYADGFTG

SEQ ID NO: 34086 - protein, 8 aa, Artificial Sequence
  Description of Artificial Sequence: Synthetic peptide
  XENP023807 vhCDR3
DYYGSSPY

SEQ ID NO: 34087 - protein, 16 aa, Artificial Sequence
  Description of Artificial Sequence: Synthetic peptide
  XENP023807 vlCDR1
KSSQSIVHSNGNTYLE

SEQ ID NO: 34088 - protein, 7 aa, Artificial Sequence
  Description of Artificial Sequence: Synthetic peptide
  XENP023807 vlCDR2
KVSNRFS

SEQ ID NO: 34089 - protein, 9 aa, Artificial Sequence
  Description of Artificial Sequence: Synthetic peptide
  XENP023807 vlCDR3
FQGSHVPNT

SEQ ID NO: 34090 - protein, 251 aa, Artificial Sequence
  Description of Artificial Sequence: Synthetic polypeptide
  XENP023808 1C11_H3.71_L3_scFv
QIQLVQSGSELKKPGASVKVSCKASGYTFTHYGMNWVRQAPGQGLEWMGWINTYTGEPTYADGFTGRFVFSLDTSVSTAYLQISSLRAEDTAVYFCARDYYGSSPYWGQGTLVTVSSGKPGSGKPGSGKPGSGKPGSDVLMTQSPDSLAVSLGERATINCKSSQSIVHSNGNTYLEWYQQKPGQSPKLLIYKVSNRFSGVPDRFSGSGSGTDFTLTISSLQAEDVAVYYCFQGSHVPNTFGGGTKVEIKGS

SEQ ID NO: 34091 - protein, 117 aa, Artificial Sequence
  Description of Artificial Sequence: Synthetic polypeptide
  VH of XENP023808
QIQLVQSGSELKKPGASVKVSCKASGYTFTHYGMNWVRQAPGQGLEWMGWINTYTGEPTYADGFTGRFVFSLDTSVSTAYLQISSLRAEDTAVYFCARDYYGSSPYWGQGTLVTVSS

SEQ ID NO: 34092 - protein, 114 aa, Artificial Sequence; identical to SEQ ID NO: 33651
  Description of Artificial Sequence: Synthetic polypeptide
  VL of XENP023808

SEQ ID NO: 34093 - protein, 5 aa, Artificial Sequence
  Description of Artificial Sequence: Synthetic peptide
  XENP023808 vhCDR1
HYGMN

SEQ ID NO: 34094 - protein, 17 aa, Artificial Sequence
  Description of Artificial Sequence: Synthetic peptide
  XENP023808 vhCDR2
WINTYTGEPTYADGFTG

SEQ ID NO: 34095 - protein, 8 aa, Artificial Sequence
  Description of Artificial Sequence: Synthetic peptide
  XENP023808 vhCDR3
DYYGSSPY

SEQ ID NO: 34096 - protein, 16 aa, Artificial Sequence
  Description of Artificial Sequence: Synthetic peptide
  XENP023808 vlCDR1
KSSQSIVHSNGNTYLE

SEQ ID NO: 34097 - protein, 7 aa, Artificial Sequence
  Description of Artificial Sequence: Synthetic peptide
  XENP023808 vlCDR2
KVSNRFS

SEQ ID NO: 34098 - protein, 9 aa, Artificial Sequence
  Description of Artificial Sequence: Synthetic peptide
  XENP023808 vlCDR3
FQGSHVPNT

SEQ ID NO: 34099 - protein, 251 aa, Artificial Sequence
  Description of Artificial Sequence: Synthetic polypeptide
  XENP023809 1C11_H3.72_L3_scFv
QIQLVQSGSELKKPGASVKVSCKASGYTFTHYGMNWVRQAPGQGLEWMGWINTYTGEPTYADGFTGRFVFSLDTSVSTAYLQISSLTAEDTAVYFCARDYYGSSPYWGQGTLVTVSSGKPGSGKPGSGKPGSGKPGSDVLMTQSPDSLAVSLGERATINCKSSQSIVHSNGNTYLEWYQQKPGQSPKLLIYKVSNRFSGVPDRFSGSGSGTDFTLTISSLQAEDVAVYYCFQGSHVPNTFGGGTKVEIKGS

SEQ ID NO: 34100 - protein, 117 aa, Artificial Sequence
  Description of Artificial Sequence: Synthetic polypeptide
  VH of XENP023809
QIQLVQSGSELKKPGASVKVSCKASGYTFTHYGMNWVRQAPGQGLEWMGWINTYTGEPTYADGFTGRFVFSLDTSVSTAYLQISSLTAEDTAVYFCARDYYGSSPYWGQGTLVTVSS

SEQ ID NO: 34101 - protein, 114 aa, Artificial Sequence; identical to SEQ ID NO: 33651
  Description of Artificial Sequence: Synthetic polypeptide
  VL of XENP023809

SEQ ID NO: 34102 - protein, 5 aa, Artificial Sequence
  Description of Artificial Sequence: Synthetic peptide
  XENP023809 vhCDR1
HYGMN

SEQ ID NO: 34103 - protein, 17 aa, Artificial Sequence
  Description of Artificial Sequence: Synthetic peptide
  XENP023809 vhCDR2
WINTYTGEPTYADGFTG

SEQ ID NO: 34104 - protein, 8 aa, Artificial Sequence
  Description of Artificial Sequence: Synthetic peptide
  XENP023809 vhCDR3
DYYGSSPY

SEQ ID NO: 34105 - protein, 16 aa, Artificial Sequence
  Description of Artificial Sequence: Synthetic peptide
  XENP023809 vlCDR1
KSSQSIVHSNGNTYLE

SEQ ID NO: 34106 - protein, 7 aa, Artificial Sequence
  Description of Artificial Sequence: Synthetic peptide
  XENP023809 vlCDR2
KVSNRFS

SEQ ID NO: 34107 - protein, 9 aa, Artificial Sequence
  Description of Artificial Sequence: Synthetic peptide
  XENP023809 vlCDR3
FQGSHVPNT

SEQ ID NO: 34108 - protein, 251 aa, Artificial Sequence
  Description of Artificial Sequence: Synthetic polypeptide
  XENP023810 1C11_H3.73_L3_scFv
QIQLVQSGSELKKPGASVKVSCKASGYTFTHYGMNWVRQAPGQGLEWMGWINTYTGEPTYADGFTGRFVFSLDTSVSTAYLQISSLRSEDTAVYFCARDYYGSSPYWGQGTLVTVSSGKPGSGKPGSGKPGSGKPGSDVLMTQSPDSLAVSLGERATINCKSSQSIVHSNGNTYLEWYQQKPGQSPKLLIYKVSNRFSGVPDRFSGSGSGTDFTLTISSLQAEDVAVYYCFQGSHVPNTFGGGTKVEIKGS

SEQ ID NO: 34109 - protein, 117 aa, Artificial Sequence
  Description of Artificial Sequence: Synthetic polypeptide
  VH of XENP023810
QIQLVQSGSELKKPGASVKVSCKASGYTFTHYGMNWVRQAPGQGLEWMGWINTYTGEPTYADGFTGRFVFSLDTSVSTAYLQISSLRSEDTAVYFCARDYYGSSPYWGQGTLVTVSS

SEQ ID NO: 34110 - protein, 114 aa, Artificial Sequence; identical to SEQ ID NO: 33651
  Description of Artificial Sequence: Synthetic polypeptide
  VL of XENP023810

SEQ ID NO: 34111 - protein, 5 aa, Artificial Sequence
  Description of Artificial Sequence: Synthetic peptide
  XENP023810 vhCDR1
HYGMN

SEQ ID NO: 34112 - protein, 17 aa, Artificial Sequence
  Description of Artificial Sequence: Synthetic peptide
  XENP023810 vhCDR2
WINTYTGEPTYADGFTG

SEQ ID NO: 34113 - protein, 8 aa, Artificial Sequence
  Description of Artificial Sequence: Synthetic peptide
  XENP023810 vhCDR3
DYYGSSPY

SEQ ID NO: 34114 - protein, 16 aa, Artificial Sequence
  Description of Artificial Sequence: Synthetic peptide
  XENP023810 vlCDR1
KSSQSIVHSNGNTYLE

SEQ ID NO: 34115 - protein, 7 aa, Artificial Sequence
  Description of Artificial Sequence: Synthetic peptide
  XENP023810 vlCDR2
KVSNRFS

SEQ ID NO: 34116 - protein, 9 aa, Artificial Sequence
  Description of Artificial Sequence: Synthetic peptide
  XENP023810 vlCDR3
FQGSHVPNT

SEQ ID NO: 34117 - protein, 251 aa, Artificial Sequence
  Description of Artificial Sequence: Synthetic polypeptide
  XENP023811 1C11_H3.74_L3_scFv
QIQLVQSGSELKKPGASVKVSCKASGYTFTHYGMNWVRQAPGQGLEWMGWINTYTGEPTYADGFTGRFVFSLDTSVSTAYLQISSLKAEDTAVYYCARDYYGSSPYWGQGTLVTVSSGKPGSGKPGSGKPGSGKPGSDVLMTQSPDSLAVSLGERATINCKSSQSIVHSNGNTYLEWYQQKPGQSPKLLIYKVSNRFSGVPDRFSGSGSGTDFTLTISSLQAEDVAVYYCFQGSHVPNTFGGGTKVEIKGS

SEQ ID NO: 34118 - protein, 117 aa, Artificial Sequence
  Description of Artificial Sequence: Synthetic polypeptide
  VH of XENP023811
QIQLVQSGSELKKPGASVKVSCKASGYTFTHYGMNWVRQAPGQGLEWMGWINTYTGEPTYADGFTGRFVFSLDTSVSTAYLQISSLKAEDTAVYYCARDYYGSSPYWGQGTLVTVSS

SEQ ID NO: 34119 - protein, 114 aa, Artificial Sequence; identical to SEQ ID NO: 33651
  Description of Artificial Sequence: Synthetic polypeptide
  VL of XENP023811

SEQ ID NO: 34120 - protein, 5 aa, Artificial Sequence
  Description of Artificial Sequence: Synthetic peptide
  XENP023811 vhCDR1
HYGMN

SEQ ID NO: 34121 - protein, 17 aa, Artificial Sequence
  Description of Artificial Sequence: Synthetic peptide
  XENP023811 vhCDR2
WINTYTGEPTYADGFTG

SEQ ID NO: 34122 - protein, 8 aa, Artificial Sequence
  Description of Artificial Sequence: Synthetic peptide
  XENP023811 vhCDR3
DYYGSSPY

SEQ ID NO: 34123 - protein, 16 aa, Artificial Sequence
  Description of Artificial Sequence: Synthetic peptide
  XENP023811 vlCDR1
KSSQSIVHSNGNTYLE

SEQ ID NO: 34124 - protein, 7 aa, Artificial Sequence
  Description of Artificial Sequence: Synthetic peptide
  XENP023811 vlCDR2
KVSNRFS

SEQ ID NO: 34125 - protein, 9 aa, Artificial Sequence
  Description of Artificial Sequence: Synthetic peptide
  XENP023811 vlCDR3
FQGSHVPNT

SEQ ID NO: 34126 - protein, 251 aa, Artificial Sequence
  Description of Artificial Sequence: Synthetic polypeptide
  XENP023812 1C11_H3.75_L3_scFv
QIQLVQSGSELKKPGASVKVSCKASGYTFTHYGMNWVRQAPGQGLEWMGWINTYTGEPTYADGFTGRFVFSLDTSVSTAYLQISSLKAEDTAVYFCTRDYYGSSPYWGQGTLVTVSSGKPGSGKPGSGKPGSGKPGSDVLMTQSPDSLAVSLGERATINCKSSQSIVHSNGNTYLEWYQQKPGQSPKLLIYKVSNRFSGVPDRFSGSGSGTDFTLTISSLQAEDVAVYYCFQGSHVPNTFGGGTKVEIKGS

SEQ ID NO: 34127 - protein, 117 aa, Artificial Sequence
  Description of Artificial Sequence: Synthetic polypeptide
  VH of XENP023812
QIQLVQSGSELKKPGASVKVSCKASGYTFTHYGMNWVRQAPGQGLEWMGWINTYTGEPTYADGFTGRFVFSLDTSVSTAYLQISSLKAEDTAVYFCTRDYYGSSPYWGQGTLVTVSS

SEQ ID NO: 34128 - protein, 114 aa, Artificial Sequence; identical to SEQ ID NO: 33651
  Description of Artificial Sequence: Synthetic polypeptide
  VL of XENP023812

SEQ ID NO: 34129 - protein, 5 aa, Artificial Sequence
  Description of Artificial Sequence: Synthetic peptide
  XENP023812 vhCDR1
HYGMN

SEQ ID NO: 34130 - protein, 17 aa, Artificial Sequence
  Description of Artificial Sequence: Synthetic peptide
  XENP023812 vhCDR2
WINTYTGEPTYADGFTG

SEQ ID NO: 34131 - protein, 8 aa, Artificial Sequence
  Description of Artificial Sequence: Synthetic peptide
  XENP023812 vhCDR3
DYYGSSPY

SEQ ID NO: 34132 - protein, 16 aa, Artificial Sequence
  Description of Artificial Sequence: Synthetic peptide
  XENP023812 vlCDR1
KSSQSIVHSNGNTYLE

SEQ ID NO: 34133 - protein, 7 aa, Artificial Sequence
  Description of Artificial Sequence: Synthetic peptide
  XENP023812 vlCDR2
KVSNRFS

SEQ ID NO: 34134 - protein, 9 aa, Artificial Sequence
  Description of Artificial Sequence: Synthetic peptide
  XENP023812 vlCDR3
FQGSHVPNT

SEQ ID NO: 34135 - protein, 251 aa, Artificial Sequence
  Description of Artificial Sequence: Synthetic polypeptide
  XENP024191 1C11_H3_L3.84_scFv
QIQLVQSGSELKKPGASVKVSCKASGYTFTHYGMNWVRQAPGQGLEWMGWINTYTGEPTYADGFTGRFVFSLDTSVSTAYLQISSLKAEDTAVYFCARDYYGSSPYWGQGTLVTVSSGKPGSGKPGSGKPGSGKPGSDVVMTQSPDSLAVSLGERATINCKASQSIVHSNGNTYLEWYQQKPGQPPKLLIYKVSNRFSGVPDRFSGSGSGTDFTLTISSLQAEDVAVYYCFQGSHVPNTFGGGTKVEIKGS

SEQ ID NO: 34136 - protein, 117 aa, Artificial Sequence; identical to SEQ ID NO: 33034
  Description of Artificial Sequence: Synthetic polypeptide
  VH of XENP024191

SEQ ID NO: 34137 - protein, 114 aa, Artificial Sequence
  Description of Artificial Sequence: Synthetic polypeptide
  VL of XENP024191
DVVMTQSPDSLAVSLGERATINCKASQSIVHSNGNTYLEWYQQKPGQPPKLLIYKVSNRFSGVPDRFSGSGSGTDFTLTISSLQAEDVAVYYCFQGSHVPNTFGGGTKVEIKGS

SEQ ID NO: 34138 - protein, 5 aa, Artificial Sequence
  Description of Artificial Sequence: Synthetic peptide
  XENP024191 vhCDR1
HYGMN

SEQ ID NO: 34139 - protein, 17 aa, Artificial Sequence
  Description of Artificial Sequence: Synthetic peptide
  XENP024191 vhCDR2
WINTYTGEPTYADGFTG

SEQ ID NO: 34140 - protein, 8 aa, Artificial Sequence
  Description of Artificial Sequence: Synthetic peptide
  XENP024191 vhCDR3
DYYGSSPY

SEQ ID NO: 34141 - protein, 16 aa, Artificial Sequence
  Description of Artificial Sequence: Synthetic peptide
  XENP024191 vlCDR1
KASQSIVHSNGNTYLE

SEQ ID NO: 34142 - protein, 7 aa, Artificial Sequence
  Description of Artificial Sequence: Synthetic peptide
  XENP024191 vlCDR2
KVSNRFS

SEQ ID NO: 34143 - protein, 9 aa, Artificial Sequence
  Description of Artificial Sequence: Synthetic peptide
  XENP024191 vlCDR3
FQGSHVPNT

SEQ ID NO: 34144 - protein, 251 aa, Artificial Sequence
  Description of Artificial Sequence: Synthetic polypeptide
  XENP024192 1C11_H3_L3.102_scFv
QIQLVQSGSELKKPGASVKVSCKASGYTFTHYGMNWVRQAPGQGLEWMGWINTYTGEPTYADGFTGRFVFSLDTSVSTAYLQISSLKAEDTAVYFCARDYYGSSPYWGQGTLVTVSSGKPGSGKPGSGKPGSGKPGSDVLMTQSPDSLAVSVGERATINCKSSQSIVHSNGNTYLEWYQQKPGQSPKLLIYKVSNRFSGVPDRFSGSGSGTDFTLTISSLQAEDVAVYYCFQGSHVPNTFGGGTKVEIKGS

SEQ ID NO: 34145 - protein, 117 aa, Artificial Sequence; identical to SEQ ID NO: 33034
  Description of Artificial Sequence: Synthetic polypeptide
  VH of XENP024192

SEQ ID NO: 34146 - protein, 114 aa, Artificial Sequence
  Description of Artificial Sequence: Synthetic polypeptide
  VL of XENP024192
DVLMTQSPDSLAVSVGERATINCKSSQSIVHSNGNTYLEWYQQKPGQSPKLLIYKVSNRFSGVPDRFSGSGSGTDFTLTISSLQAEDVAVYYCFQGSHVPNTFGGGTKVEIKGS

SEQ ID NO: 34147 - protein, 5 aa, Artificial Sequence
  Description of Artificial Sequence: Synthetic peptide
  XENP024192 vhCDR1
HYGMN

SEQ ID NO: 34148 - protein, 17 aa, Artificial Sequence
  Description of Artificial Sequence: Synthetic peptide
  XENP024192 vhCDR2
WINTYTGEPTYADGFTG

SEQ ID NO: 34149 - protein, 8 aa, Artificial Sequence
  Description of Artificial Sequence: Synthetic peptide
  XENP024192 vhCDR3
DYYGSSPY

SEQ ID NO: 34150 - protein, 16 aa, Artificial Sequence
  Description of Artificial Sequence: Synthetic peptide
  XENP024192 vlCDR1
KSSQSIVHSNGNTYLE

SEQ ID NO: 34151 - protein, 7 aa, Artificial Sequence
  Description of Artificial Sequence: Synthetic peptide
  XENP024192 vlCDR2
KVSNRFS

SEQ ID NO: 34152 - protein, 9 aa, Artificial Sequence
  Description of Artificial Sequence: Synthetic peptide
  XENP024192 vlCDR3
FQGSHVPNT

SEQ ID NO: 34153 - protein, 251 aa, Artificial Sequence
  Description of Artificial Sequence: Synthetic polypeptide
  XENP024193 1C11_H3_L3.103_scFv
QIQLVQSGSELKKPGASVKVSCKASGYTFTHYGMNWVRQAPGQGLEWMGWINTYTGEPTYADGFTGRFVFSLDTSVSTAYLQISSLKAEDTAVYFCARDYYGSSPYWGQGTLVTVSSGKPGSGKPGSGKPGSGKPGSDVLMTQSPDSLAVSPGERATINCKSSQSIVHSNGNTYLEWYQQKPGQSPKLLIYKVSNRFSGVPDRFSGSGSGTDFTLTISSLQAEDVAVYYCFQGSHVPNTFGGGTKVEIKGS

SEQ ID NO: 34154 - protein, 117 aa, Artificial Sequence; identical to SEQ ID NO: 33034
  Description of Artificial Sequence: Synthetic polypeptide
  VH of XENP024193

SEQ ID NO: 34155 - protein, 114 aa, Artificial Sequence
  Description of Artificial Sequence: Synthetic polypeptide
  VL of XENP024193
DVLMTQSPDSLAVSPGERATINCKSSQSIVHSNGNTYLEWYQQKPGQSPKLLIYKVSNRFSGVPDRFSGSGSGTDFTLTISSLQAEDVAVYYCFQGSHVPNTFGGGTKVEIKGS

SEQ ID NO: 34156 - protein, 5 aa, Artificial Sequence
  Description of Artificial Sequence: Synthetic peptide
  XENP024193 vhCDR1
HYGMN

SEQ ID NO: 34157 - protein, 17 aa, Artificial Sequence
  Description of Artificial Sequence: Synthetic peptide
  XENP024193 vhCDR2
WINTYTGEPTYADGFTG

SEQ ID NO: 34158 - protein, 8 aa, Artificial Sequence
  Description of Artificial Sequence: Synthetic peptide
  XENP024193 vhCDR3
DYYGSSPY

SEQ ID NO: 34159 - protein, 16 aa, Artificial Sequence
  Description of Artificial Sequence: Synthetic peptide
  XENP024193 vlCDR1
KSSQSIVHSNGNTYLE

SEQ ID NO: 34160 - protein, 7 aa, Artificial Sequence
  Description of Artificial Sequence: Synthetic peptide
  XENP024193 vlCDR2
KVSNRFS

SEQ ID NO: 34161 - protein, 9 aa, Artificial Sequence
  Description of Artificial Sequence: Synthetic peptide
  XENP024193 vlCDR3
FQGSHVPNT

SEQ ID NO: 34162 - protein, 251 aa, Artificial Sequence; identical to SEQ ID NO: 33235
  Description of Artificial Sequence: Synthetic polypeptide
  XENP024194 1C11_H3_L3.104_scFv

SEQ ID NO: 34163 - protein, 117 aa, Artificial Sequence; identical to SEQ ID NO: 33034
  Description of Artificial Sequence: Synthetic polypeptide
  VH of XENP024194

SEQ ID NO: 34164 - protein, 114 aa, Artificial Sequence; identical to SEQ ID NO: 33237
  Description of Artificial Sequence: Synthetic polypeptide
  VL of XENP024194

SEQ ID NO: 34165 - protein, 5 aa, Artificial Sequence
  Description of Artificial Sequence: Synthetic peptide
  XENP024194 vhCDR1
HYGMN

SEQ ID NO: 34166 - protein, 17 aa, Artificial Sequence
  Description of Artificial Sequence: Synthetic peptide
  XENP024194 vhCDR2
WINTYTGEPTYADGFTG

SEQ ID NO: 34167 - protein, 8 aa, Artificial Sequence
  Description of Artificial Sequence: Synthetic peptide
  XENP024194 vhCDR3
DYYGSSPY

SEQ ID NO: 34168 - protein, 16 aa, Artificial Sequence
  Description of Artificial Sequence: Synthetic peptide
  XENP024194 vlCDR1
KSSQSIVHSNGNTYLE

SEQ ID NO: 34169 - protein, 7 aa, Artificial Sequence
  Description of Artificial Sequence: Synthetic peptide
  XENP024194 vlCDR2
KVSNRFS

SEQ ID NO: 34170 - protein, 9 aa, Artificial Sequence
  Description of Artificial Sequence: Synthetic peptide
  XENP024194 vlCDR3
FQGSHVPNT

SEQ ID NO: 34171 - protein, 251 aa, Artificial Sequence
  Description of Artificial Sequence: Synthetic polypeptide
  XENP024195 1C11_H3_L3.111_scFv
QIQLVQSGSELKKPGASVKVSCKASGYTFTHYGMNWVRQAPGQGLEWMGWINTYTGEPTYADGFTGRFVFSLDTSVSTAYLQISSLKAEDTAVYFCARDYYGSSPYWGQGTLVTVSSGKPGSGKPGSGKPGSGKPGSDVLMTQSPDSLAVSLGERATINCKSSQGIVHSNGNTYLEWYQQKPGQSPKLLIYKVSNRFSGVPDRFSGSGSGTDFTLTISSLQAEDVAVYYCFQGSHVPNTFGGGTKVEIKGS

SEQ ID NO: 34172 - protein, 117 aa, Artificial Sequence; identical to SEQ ID NO: 33034
  Description of Artificial Sequence: Synthetic polypeptide
  VH of XENP024195

SEQ ID NO: 34173 - protein, 114 aa, Artificial Sequence
  Description of Artificial Sequence: Synthetic polypeptide
  VL of XENP024195
DVLMTQSPDSLAVSLGERATINCKSSQGIVHSNGNTYLEWYQQKPGQSPKLLIYKVSNRFSGVPDRFSGSGSGTDFTLTISSLQAEDVAVYYCFQGSHVPNTFGGGTKVEIKGS

SEQ ID NO: 34174 - protein, 5 aa, Artificial Sequence
  Description of Artificial Sequence: Synthetic peptide
  XENP024195 vhCDR1
HYGMN

SEQ ID NO: 34175 - protein, 17 aa, Artificial Sequence
  Description of Artificial Sequence: Synthetic peptide
  XENP024195 vhCDR2
WINTYTGEPTYADGFTG

SEQ ID NO: 34176 - protein, 8 aa, Artificial Sequence
  Description of Artificial Sequence: Synthetic peptide
  XENP024195 vhCDR3
DYYGSSPY

SEQ ID NO: 34177 - protein, 16 aa, Artificial Sequence
  Description of Artificial Sequence: Synthetic peptide
  XENP024195 vlCDR1
KSSQGIVHSNGNTYLE

SEQ ID NO: 34178 - protein, 7 aa, Artificial Sequence
  Description of Artificial Sequence: Synthetic peptide
  XENP024195 vlCDR2
KVSNRFS

SEQ ID NO: 34179 - protein, 9 aa, Artificial Sequence
  Description of Artificial Sequence: Synthetic peptide
  XENP024195 vlCDR3
FQGSHVPNT

SEQ ID NO: 34180 - protein, 251 aa, Artificial Sequence
  Description of Artificial Sequence: Synthetic polypeptide
  XENP024196 1C11_H3_L3.112_scFv
QIQLVQSGSELKKPGASVKVSCKASGYTFTHYGMNWVRQAPGQGLEWMGWINTYTGEPTYADGFTGRFVFSLDTSVSTAYLQISSLKAEDTAVYFCARDYYGSSPYWGQGTLVTVSSGKPGSGKPGSGKPGSGKPGSDVLMTQSPDSLAVSLGERATINCKSSQSVLHSNGNTYLEWYQQKPGQSPKLLIYKVSNRFSGVPDRFSGSGSGTDFTLTISSLQAEDVAVYYCFQGSHVPNTFGGGTKVEIKGS

SEQ ID NO: 34181 - protein, 117 aa, Artificial Sequence; identical to SEQ ID NO: 33034
  Description of Artificial Sequence: Synthetic polypeptide
  VH of XENP024196

SEQ ID NO: 34182 - protein, 114 aa, Artificial Sequence
  Description of Artificial Sequence: Synthetic polypeptide
  VL of XENP024196
DVLMTQSPDSLAVSLGERATINCKSSQSVLHSNGNTYLEWYQQKPGQSPKLLIYKVSNRFSGVPDRFSGSGSGTDFTLTISSLQAEDVAVYYCFQGSHVPNTFGGGTKVEIKGS

SEQ ID NO: 34183 - protein, 5 aa, Artificial Sequence
  Description of Artificial Sequence: Synthetic peptide
  XENP024196 vhCDR1
HYGMN

SEQ ID NO: 34184 - protein, 17 aa, Artificial Sequence
  Description of Artificial Sequence: Synthetic peptide
  XENP024196 vhCDR2
WINTYTGEPTYADGFTG

SEQ ID NO: 34185 - protein, 8 aa, Artificial Sequence
  Description of Artificial Sequence: Synthetic peptide
  XENP024196 vhCDR3
DYYGSSPY

SEQ ID NO: 34186 - protein, 16 aa, Artificial Sequence
  Description of Artificial Sequence: Synthetic peptide
  XENP024196 vlCDR1
KSSQSVLHSNGNTYLE

SEQ ID NO: 34187 - protein, 7 aa, Artificial Sequence
  Description of Artificial Sequence: Synthetic peptide
  XENP024196 vlCDR2
KVSNRFS

SEQ ID NO: 34188 - protein, 9 aa, Artificial Sequence
  Description of Artificial Sequence: Synthetic peptide
  XENP024196 vlCDR3
FQGSHVPNT

SEQ ID NO: 34189 - protein, 251 aa, Artificial Sequence
  Description of Artificial Sequence: Synthetic polypeptide
  XENP024201 1C11_H3_L3.113_scFv
QIQLVQSGSELKKPGASVKVSCKASGYTFTHYGMNWVRQAPGQGLEWMGWINTYTGEPTYADGFTGRFVFSLDTSVSTAYLQISSLKAEDTAVYFCARDYYGSSPYWGQGTLVTVSSGKPGSGKPGSGKPGSGKPGSDVLMTQSPDSLAVSLGERATINCKSSQSIVHSNGNTYLEWYQQKPGKSPKLLIYKVSNRFSGVPDRFSGSGSGTDFTLTISSLQAEDVAVYYCFQGSHVPNTFGGGTKVEIKGS

SEQ ID NO: 34190 - protein, 117 aa, Artificial Sequence; identical to SEQ ID NO: 33034
  Description of Artificial Sequence: Synthetic polypeptide
  VH of XENP024201

SEQ ID NO: 34191 - protein, 114 aa, Artificial Sequence
  Description of Artificial Sequence: Synthetic polypeptide
  VL of XENP024201
DVLMTQSPDSLAVSLGERATINCKSSQSIVHSNGNTYLEWYQQKPGKSPKLLIYKVSNRFSGVPDRFSGSGSGTDFTLTISSLQAEDVAVYYCFQGSHVPNTFGGGTKVEIKGS

SEQ ID NO: 34192 - protein, 5 aa, Artificial Sequence
  Description of Artificial Sequence: Synthetic peptide
  XENP024201 vhCDR1
HYGMN

SEQ ID NO: 34193 - protein, 17 aa, Artificial Sequence
  Description of Artificial Sequence: Synthetic peptide
  XENP024201 vhCDR2
WINTYTGEPTYADGFTG

SEQ ID NO: 34194 - protein, 8 aa, Artificial Sequence
  Description of Artificial Sequence: Synthetic peptide
  XENP024201 vhCDR3
DYYGSSPY

SEQ ID NO: 34195 - protein, 16 aa, Artificial Sequence
  Description of Artificial Sequence: Synthetic peptide
  XENP024201 vlCDR1
KSSQSIVHSNGNTYLE

SEQ ID NO: 34196 - protein, 7 aa, Artificial Sequence
  Description of Artificial Sequence: Synthetic peptide
  XENP024201 vlCDR2
KVSNRFS

SEQ ID NO: 34197 - protein, 9 aa, Artificial Sequence
  Description of Artificial Sequence: Synthetic peptide
  XENP024201 vlCDR3
FQGSHVPNT

SEQ ID NO: 34198 - protein, 251 aa, Artificial Sequence
  Description of Artificial Sequence: Synthetic polypeptide
  XENP024202 1C11_H3_L3.115_scFv
QIQLVQSGSELKKPGASVKVSCKASGYTFTHYGMNWVRQAPGQGLEWMGWINTYTGEPTYADGFTGRFVFSLDTSVSTAYLQISSLKAEDTAVYFCARDYYGSSPYWGQGTLVTVSSGKPGSGKPGSGKPGSGKPGSDVLMTQSPDSLAVSLGERATINCKSSQSIVHSNGNTYLEWYQQKPGKVPKLLIYKVSNRFSGVPDRFSGSGSGTDFTLTISSLQAEDVAVYYCFQGSHVPNTFGGGTKVEIKGS

SEQ ID NO: 34199 - protein, 117 aa, Artificial Sequence; identical to SEQ ID NO: 33034
  Description of Artificial Sequence: Synthetic polypeptide
  VH of XENP024202

SEQ ID NO: 34200 - protein, 114 aa, Artificial Sequence
  Description of Artificial Sequence: Synthetic polypeptide
  VL of XENP024202
DVLMTQSPDSLAVSLGERATINCKSSQSIVHSNGNTYLEWYQQKPGKVPKLLIYKVSNRFSGVPDRFSGSGSGTDFTLTISSLQAEDVAVYYCFQGSHVPNTFGGGTKVEIKGS

SEQ ID NO: 34201 - protein, 5 aa, Artificial Sequence
  Description of Artificial Sequence: Synthetic peptide
  XENP024202 vhCDR1
HYGMN

SEQ ID NO: 34202 - protein, 17 aa, Artificial Sequence
  Description of Artificial Sequence: Synthetic peptide
  XENP024202 vhCDR2
WINTYTGEPTYADGFTG

SEQ ID NO: 34203 - protein, 8 aa, Artificial Sequence
  Description of Artificial Sequence: Synthetic peptide
  XENP024202 vhCDR3
DYYGSSPY

SEQ ID NO: 34204 - protein, 16 aa, Artificial Sequence
  Description of Artificial Sequence: Synthetic peptide
  XENP024202 vlCDR1
KSSQSIVHSNGNTYLE

SEQ ID NO: 34205 - protein, 7 aa, Artificial Sequence
  Description of Artificial Sequence: Synthetic peptide
  XENP024202 vlCDR2
KVSNRFS

SEQ ID NO: 34206 - protein, 9 aa, Artificial Sequence
  Description of Artificial Sequence: Synthetic peptide
  XENP024202 vlCDR3
FQGSHVPNT

SEQ ID NO: 34207 - protein, 251 aa, Artificial Sequence
  Description of Artificial Sequence: Synthetic polypeptide
  XENP024203 1C11_H3_L3.118_scFv
QIQLVQSGSELKKPGASVKVSCKASGYTFTHYGMNWVRQAPGQGLEWMGWINTYTGEPTYADGFTGRFVFSLDTSVSTAYLQISSLKAEDTAVYFCARDYYGSSPYWGQGTLVTVSSGKPGSGKPGSGKPGSGKPGSDVLMTQSPDSLAVSLGERATINCKSSQSIVHSNGNTYLEWYQQKPGQSPKLLIYKVSSRFSGVPDRFSGSGSGTDFTLTISSLQAEDVAVYYCFQGSHVPNTFGGGTKVEIKGS

SEQ ID NO: 34208 - protein, 117 aa, Artificial Sequence; identical to SEQ ID NO: 33034
  Description of Artificial Sequence: Synthetic polypeptide
  VH of XENP024203

SEQ ID NO: 34209 - protein, 114 aa, Artificial Sequence
  Description of Artificial Sequence: Synthetic polypeptide
  VL of XENP024203
DVLMTQSPDSLAVSLGERATINCKSSQSIVHSNGNTYLEWYQQKPGQSPKLLIYKVSSRFSGVPDRFSGSGSGTDFTLTISSLQAEDVAVYYCFQGSHVPNTFGGGTKVEIKGS

SEQ ID NO: 34210 - protein, 5 aa, Artificial Sequence
  Description of Artificial Sequence: Synthetic peptide
  XENP024203 vhCDR1
HYGMN

SEQ ID NO: 34211 - protein, 17 aa, Artificial Sequence
  Description of Artificial Sequence: Synthetic peptide
  XENP024203 vhCDR2
WINTYTGEPTYADGFTG

SEQ ID NO: 34212 - protein, 8 aa, Artificial Sequence
  Description of Artificial Sequence: Synthetic peptide
  XENP024203 vhCDR3
DYYGSSPY

SEQ ID NO: 34213 - protein, 16 aa, Artificial Sequence
  Description of Artificial Sequence: Synthetic peptide
  XENP024203 vlCDR1
KSSQSIVHSNGNTYLE

SEQ ID NO: 34214 - protein, 7 aa, Artificial Sequence
  Description of Artificial Sequence: Synthetic peptide
  XENP024203 vlCDR2
KVSSRFS

SEQ ID NO: 34215 - protein, 9 aa, Artificial Sequence
  Description of Artificial Sequence: Synthetic peptide
  XENP024203 vlCDR3
FQGSHVPNT

SEQ ID NO: 34216 - protein, 251 aa, Artificial Sequence
  Description of Artificial Sequence: Synthetic polypeptide
  XENP024204 1C11_H3_L3.119_scFv
QIQLVQSGSELKKPGASVKVSCKASGYTFTHYGMNWVRQAPGQGLEWMGWINTYTGEPTYADGFTGRFVFSLDTSVSTAYLQISSLKAEDTAVYFCARDYYGSSPYWGQGTLVTVSSGKPGSGKPGSGKPGSGKPGSDVLMTQSPDSLAVSLGERATINCKSSQSIVHSNGNTYLEWYQQKPGQSPKLLIYKVSNLFSGVPDRFSGSGSGTDFTLTISSLQAEDVAVYYCFQGSHVPNTFGGGTKVEIKGS

SEQ ID NO: 34217 - protein, 117 aa, Artificial Sequence; identical to SEQ ID NO: 33034
  Description of Artificial Sequence: Synthetic polypeptide
  VH of XENP024204

SEQ ID NO: 34218 - protein, 114 aa, Artificial Sequence
  Description of Artificial Sequence: Synthetic polypeptide
  VL of XENP024204
DVLMTQSPDSLAVSLGERATINCKSSQSIVHSNGNTYLEWYQQKPGQSPKLLIYKVSNLFSGVPDRFSGSGSGTDFTLTISSLQAEDVAVYYCFQGSHVPNTFGGGTKVEIKGS

SEQ ID NO: 34219 - protein, 5 aa, Artificial Sequence
  Description of Artificial Sequence: Synthetic peptide
  XENP024204 vhCDR1
HYGMN

SEQ ID NO: 34220 - protein, 17 aa, Artificial Sequence
  Description of Artificial Sequence: Synthetic peptide
  XENP024204 vhCDR2
WINTYTGEPTYADGFTG

SEQ ID NO: 34221 - protein, 8 aa, Artificial Sequence
  Description of Artificial Sequence: Synthetic peptide
  XENP024204 vhCDR3
DYYGSSPY

SEQ ID NO: 34222 - protein, 16 aa, Artificial Sequence
  Description of Artificial Sequence: Synthetic peptide
  XENP024204 vlCDR1
KSSQSIVHSNGNTYLE

SEQ ID NO: 34223 - protein, 7 aa, Artificial Sequence
  Description of Artificial Sequence: Synthetic peptide
  XENP024204 vlCDR2
KVSNLFS

SEQ ID NO: 34224 - protein, 9 aa, Artificial Sequence
  Description of Artificial Sequence: Synthetic peptide
  XENP024204 vlCDR3
FQGSHVPNT

SEQ ID NO: 34225 - protein, 251 aa, Artificial Sequence
  Description of Artificial Sequence: Synthetic polypeptide
  XENP024205 1C11_H3_L3.120_scFv
QIQLVQSGSELKKPGASVKVSCKASGYTFTHYGMNWVRQAPGQGLEWMGWINTYTGEPTYADGFTGRFVFSLDTSVSTAYLQISSLKAEDTAVYFCARDYYGSSPYWGQGTLVTVSSGKPGSGKPGSGKPGSGKPGSDVLMTQSPDSLAVSLGERATINCKSSQSIVHSNGNTYLEWYQQKPGQSPKLLIYKVSNRESGVPDRFSGSGSGTDFTLTISSLQAEDVAVYYCFQGSHVPNTFGGGTKVEIKGS

SEQ ID NO: 34226 - protein, 117 aa, Artificial Sequence; identical to SEQ ID NO: 33034
  Description of Artificial Sequence: Synthetic polypeptide
  VH of XENP024205

SEQ ID NO: 34227 - protein, 114 aa, Artificial Sequence
  Description of Artificial Sequence: Synthetic polypeptide
  VL of XENP024205
DVLMTQSPDSLAVSLGERATINCKSSQSIVHSNGNTYLEWYQQKPGQSPKLLIYKVSNRESGVPDRFSGSGSGTDFTLTISSLQAEDVAVYYCFQGSHVPNTFGGGTKVEIKGS

SEQ ID NO: 34228 - protein, 5 aa, Artificial Sequence
  Description of Artificial Sequence: Synthetic peptide
  XENP024205 vhCDR1
HYGMN

SEQ ID NO: 34229 - protein, 17 aa, Artificial Sequence
  Description of Artificial Sequence: Synthetic peptide
  XENP024205 vhCDR2
WINTYTGEPTYADGFTG

SEQ ID NO: 34230 - protein, 8 aa, Artificial Sequence
  Description of Artificial Sequence: Synthetic peptide
  XENP024205 vhCDR3
DYYGSSPY

SEQ ID NO: 34231 - protein, 16 aa, Artificial Sequence
  Description of Artificial Sequence: Synthetic peptide
  XENP024205 vlCDR1
KSSQSIVHSNGNTYLE

SEQ ID NO: 34232 - protein, 7 aa, Artificial Sequence
  Description of Artificial Sequence: Synthetic peptide
  XENP024205 vlCDR2
KVSNRES

SEQ ID NO: 34233 - protein, 9 aa, Artificial Sequence
  Description of Artificial Sequence: Synthetic peptide
  XENP024205 vlCDR3
FQGSHVPNT

SEQ ID NO: 34234 - protein, 251 aa, Artificial Sequence
  Description of Artificial Sequence: Synthetic polypeptide
  XENP024206 1C11_H3_L3.121_scFv
QIQLVQSGSELKKPGASVKVSCKASGYTFTHYGMNWVRQAPGQGLEWMGWINTYTGEPTYADGFTGRFVFSLDTSVSTAYLQISSLKAEDTAVYFCARDYYGSSPYWGQGTLVTVSSGKPGSGKPGSGKPGSGKPGSDVLMTQSPDSLAVSLGERATINCKSSQSIVHSNGNTYLEWYQQKPGQSPKLLIYKVSNRQSGVPDRFSGSGSGTDFTLTISSLQAEDVAVYYCFQGSHVPNTFGGGTKVEIKGS

SEQ ID NO: 34235 - protein, 117 aa, Artificial Sequence; identical to SEQ ID NO: 33034
  Description of Artificial Sequence: Synthetic polypeptide
  VH of XENP024206

SEQ ID NO: 34236 - protein, 114 aa, Artificial Sequence
  Description of Artificial Sequence: Synthetic polypeptide
  VL of XENP024206
DVLMTQSPDSLAVSLGERATINCKSSQSIVHSNGNTYLEWYQQKPGQSPKLLIYKVSNRQSGVPDRFSGSGSGTDFTLTISSLQAEDVAVYYCFQGSHVPNTFGGGTKVEIKGS

SEQ ID NO: 34237 - protein, 5 aa, Artificial Sequence
  Description of Artificial Sequence: Synthetic peptide
  XENP024206 vhCDR1
HYGMN

SEQ ID NO: 34238 - protein, 17 aa, Artificial Sequence
  Description of Artificial Sequence: Synthetic peptide
  XENP024206 vhCDR2
WINTYTGEPTYADGFTG

SEQ ID NO: 34239 - protein, 8 aa, Artificial Sequence
  Description of Artificial Sequence: Synthetic peptide
  XENP024206 vhCDR3
DYYGSSPY

SEQ ID NO: 34240 - protein, 16 aa, Artificial Sequence
  Description of Artificial Sequence: Synthetic peptide
  XENP024206 vlCDR1
KSSQSIVHSNGNTYLE

SEQ ID NO: 34241 - protein, 7 aa, Artificial Sequence
  Description of Artificial Sequence: Synthetic peptide
  XENP024206 vlCDR2
KVSNRQS

SEQ ID NO: 34242 - protein, 9 aa, Artificial Sequence
  Description of Artificial Sequence: Synthetic peptide
  XENP024206 vlCDR3
FQGSHVPNT

SEQ ID NO: 34243 - protein, 251 aa, Artificial Sequence
  Description of Artificial Sequence: Synthetic polypeptide
  XENP024207 1C11_H3_L3.122_scFv
QIQLVQSGSELKKPGASVKVSCKASGYTFTHYGMNWVRQAPGQGLEWMGWINTYTGEPTYADGFTGRFVFSLDTSVSTAYLQISSLKAEDTAVYFCARDYYGSSPYWGQGTLVTVSSGKPGSGKPGSGKPGSGKPGSDVLMTQSPDSLAVSLGERATINCKSSQSIVHSNGNTYLEWYQQKPGQSPKLLIYKVSNRFSGIPDRFSGSGSGTDFTLTISSLQAEDVAVYYCFQGSHVPNTFGGGTKVEIKGS

SEQ ID NO: 34244 - protein, 117 aa, Artificial Sequence; identical to SEQ ID NO: 33034
  Description of Artificial Sequence: Synthetic polypeptide
  VH of XENP024207

SEQ ID NO: 34245 - protein, 114 aa, Artificial Sequence
  Description of Artificial Sequence: Synthetic polypeptide
  VL of XENP024207
DVLMTQSPDSLAVSLGERATINCKSSQSIVHSNGNTYLEWYQQKPGQSPKLLIYKVSNRFSGIPDRFSGSGSGTDFTLTISSLQAEDVAVYYCFQGSHVPNTFGGGTKVEIKGS

SEQ ID NO: 34246 - protein, 5 aa, Artificial Sequence
  Description of Artificial Sequence: Synthetic peptide
  XENP024207 vhCDR1
HYGMN

SEQ ID NO: 34247 - protein, 17 aa, Artificial Sequence
  Description of Artificial Sequence: Synthetic peptide
  XENP024207 vhCDR2
WINTYTGEPTYADGFTG

SEQ ID NO: 34248 - protein, 8 aa, Artificial Sequence
  Description of Artificial Sequence: Synthetic peptide
  XENP024207 vhCDR3
DYYGSSPY

SEQ ID NO: 34249 - protein, 16 aa, Artificial Sequence
  Description of Artificial Sequence: Synthetic peptide
  XENP024207 vlCDR1
KSSQSIVHSNGNTYLE

SEQ ID NO: 34250 - protein, 7 aa, Artificial Sequence
  Description of Artificial Sequence: Synthetic peptide
  XENP024207 vlCDR2
KVSNRFS

SEQ ID NO: 34251 - protein, 9 aa, Artificial Sequence
  Description of Artificial Sequence: Synthetic peptide
  XENP024207 vlCDR3
FQGSHVPNT

SEQ ID NO: 34252 - protein, 251 aa, Artificial Sequence
  Description of Artificial Sequence: Synthetic polypeptide
  XENP024208 1C11_H3_L3.124_scFv
QIQLVQSGSELKKPGASVKVSCKASGYTFTHYGMNWVRQAPGQGLEWMGWINTYTGEPTYADGFTGRFVFSLDTSVSTAYLQISSLKAEDTAVYFCARDYYGSSPYWGQGTLVTVSSGKPGSGKPGSGKPGSGKPGSDVLMTQSPDSLAVSLGERATINCKSSQSIVHSNGNTYLEWYQQKPGQSPKLLIYKVSNRFSGVPARFSGSGSGTDFTLTISSLQAEDVAVYYCFQGSHVPNTFGGGTKVEIKGS

SEQ ID NO: 34253 - protein, 117 aa, Artificial Sequence; identical to SEQ ID NO: 33034
  Description of Artificial Sequence: Synthetic polypeptide
  VH of XENP024208

SEQ ID NO: 34254 - protein, 114 aa, Artificial Sequence
  Description of Artificial Sequence: Synthetic polypeptide
  VL of XENP024208
DVLMTQSPDSLAVSLGERATINCKSSQSIVHSNGNTYLEWYQQKPGQSPKLLIYKVSNRFSGVPARFSGSGSGTDFTLTISSLQAEDVAVYYCFQGSHVPNTFGGGTKVEIKGS

SEQ ID NO: 34255 - protein, 5 aa, Artificial Sequence
  Description of Artificial Sequence: Synthetic peptide
  XENP024208 vhCDR1
HYGMN

SEQ ID NO: 34256 - protein, 17 aa, Artificial Sequence
  Description of Artificial Sequence: Synthetic peptide
  XENP024208 vhCDR2
WINTYTGEPTYADGFTG

SEQ ID NO: 34257 - protein, 8 aa, Artificial Sequence
  Description of Artificial Sequence: Synthetic peptide
  XENP024208 vhCDR3
DYYGSSPY

SEQ ID NO: 34258 - protein, 16 aa, Artificial Sequence
  Description of Artificial Sequence: Synthetic peptide
  XENP024208 vlCDR1
KSSQSIVHSNGNTYLE

SEQ ID NO: 34259 - protein, 7 aa, Artificial Sequence
  Description of Artificial Sequence: Synthetic peptide
  XENP024208 vlCDR2
KVSNRFS

SEQ ID NO: 34260 - protein, 9 aa, Artificial Sequence
  Description of Artificial Sequence: Synthetic peptide
  XENP024208 vlCDR3
FQGSHVPNT

SEQ ID NO: 34261 - protein, 251 aa, Artificial Sequence
  Description of Artificial Sequence: Synthetic polypeptide
  XENP024209 1C11_H3_L3.125_scFv
QIQLVQSGSELKKPGASVKVSCKASGYTFTHYGMNWVRQAPGQGLEWMGWINTYTGEPTYADGFTGRFVFSLDTSVSTAYLQISSLKAEDTAVYFCARDYYGSSPYWGQGTLVTVSSGKPGSGKPGSGKPGSGKPGSDVLMTQSPDSLAVSLGERATINCKSSQSIVHSNGNTYLEWYQQKPGQSPKLLIYKVSNRFSGVPDRFSGSGSGTDFTLTISSVEAEDVAVYYCFQGSHVPNTFGGGTKVEIKGS

SEQ ID NO: 34262 - protein, 117 aa, Artificial Sequence; identical to SEQ ID NO: 33034
  Description of Artificial Sequence: Synthetic polypeptide
  VH of XENP024209

SEQ ID NO: 34263 - protein, 114 aa, Artificial Sequence
  Description of Artificial Sequence: Synthetic polypeptide
  VL of XENP024209
DVLMTQSPDSLAVSLGERATINCKSSQSIVHSNGNTYLEWYQQKPGQSPKLLIYKVSNRFSGVPDRFSGSGSGTDFTLTISSVEAEDVAVYYCFQGSHVPNTFGGGTKVEIKGS

SEQ ID NO: 34264 - protein, 5 aa, Artificial Sequence
  Description of Artificial Sequence: Synthetic peptide
  XENP024209 vhCDR1
HYGMN

SEQ ID NO: 34265 - protein, 17 aa, Artificial Sequence
  Description of Artificial Sequence: Synthetic peptide
  XENP024209 vhCDR2
WINTYTGEPTYADGFTG

SEQ ID NO: 34266 - protein, 8 aa, Artificial Sequence
  Description of Artificial Sequence: Synthetic peptide
  XENP024209 vhCDR3
DYYGSSPY

SEQ ID NO: 34267 - protein, 16 aa, Artificial Sequence
  Description of Artificial Sequence: Synthetic peptide
  XENP024209 vlCDR1
KSSQSIVHSNGNTYLE

SEQ ID NO: 34268 - protein, 7 aa, Artificial Sequence
  Description of Artificial Sequence: Synthetic peptide
  XENP024209 vlCDR2
KVSNRFS

SEQ ID NO: 34269 - protein, 9 aa, Artificial Sequence
  Description of Artificial Sequence: Synthetic peptide
  XENP024209 vlCDR3
FQGSHVPNT

SEQ ID NO: 34270 - protein, 251 aa, Artificial Sequence
  Description of Artificial Sequence: Synthetic polypeptide
  XENP024210 1C11_H3_L3.132_scFv
QIQLVQSGSELKKPGASVKVSCKASGYTFTHYGMNWVRQAPGQGLEWMGWINTYTGEPTYADGFTGRFVFSLDTSVSTAYLQISSLKAEDTAVYFCARDYYGSSPYWGQGTLVTVSSGKPGSGKPGSGKPGSGKPGSDVLMTQSPDSLAVSLGERATINCKSSQSIVHSNGNTYLEWYQQKPGQSPKLLIYKVSNRFSGVPDRFSGSGSGTDFTLTISSLQAEDVAVYYCFQGSHVPNTFGPGTKVEIKGS

SEQ ID NO: 34271 - protein, 117 aa, Artificial Sequence; identical to SEQ ID NO: 33034
  Description of Artificial Sequence: Synthetic polypeptide
  VH of XENP024210

SEQ ID NO: 34272 - protein, 114 aa, Artificial Sequence
  Description of Artificial Sequence: Synthetic polypeptide
  VL of XENP024210
DVLMTQSPDSLAVSLGERATINCKSSQSIVHSNGNTYLEWYQQKPGQSPKLLIYKVSNRFSGVPDRFSGSGSGTDFTLTISSLQAEDVAVYYCFQGSHVPNTFGPGTKVEIKGS

SEQ ID NO: 34273 - protein, 5 aa, Artificial Sequence
  Description of Artificial Sequence: Synthetic peptide
  XENP024210 vhCDR1
HYGMN

SEQ ID NO: 34274 - protein, 17 aa, Artificial Sequence
  Description of Artificial Sequence: Synthetic peptide
  XENP024210 vhCDR2
WINTYTGEPTYADGFTG

SEQ ID NO: 34275 - protein, 8 aa, Artificial Sequence
  Description of Artificial Sequence: Synthetic peptide
  XENP024210 vhCDR3
DYYGSSPY

SEQ ID NO: 34276 - protein, 16 aa, Artificial Sequence
  Description of Artificial Sequence: Synthetic peptide
  XENP024210 vlCDR1
KSSQSIVHSNGNTYLE

SEQ ID NO: 34277 - protein, 7 aa, Artificial Sequence
  Description of Artificial Sequence: Synthetic peptide
  XENP024210 vlCDR2
KVSNRFS

SEQ ID NO: 34278 - protein, 9 aa, Artificial Sequence
  Description of Artificial Sequence: Synthetic peptide
  XENP024210 vlCDR3
FQGSHVPNT

SEQ ID NO: 34279 - protein, 251 aa, Artificial Sequence
  Description of Artificial Sequence: Synthetic polypeptide
  XENP024211 1C11_H3.78_L3_scFv
QIQLVQSGPELKKPGASVKVSCKASGYTFTHYGMNWVRQAPGQGLEWMGWINTNTGEPTYADGFTGRFVFSVDTSQSTAYLQISSLKAEDTAVYFCARDYYGSSPYWGQGTLVTVSSGKPGSGKPGSGKPGSGKPGSDVLMTQSPDSLAVSLGERATINCKSSQSIVHSNGNTYLEWYQQKPGQSPKLLIYKVSNRFSGVPDRFSGSGSGTDFTLTISSLQAEDVAVYYCFQGSHVPNTFGGGTKVEIKGS

SEQ ID NO: 34280 - protein, 117 aa, Artificial Sequence
  Description of Artificial Sequence: Synthetic polypeptide
  VH of XENP024211
QIQLVQSGPELKKPGASVKVSCKASGYTFTHYGMNWVRQAPGQGLEWMGWINTNTGEPTYADGFTGRFVFSVDTSQSTAYLQISSLKAEDTAVYFCARDYYGSSPYWGQGTLVTVSS

SEQ ID NO: 34281 - protein, 114 aa, Artificial Sequence; identical to SEQ ID NO: 33651
  Description of Artificial Sequence: Synthetic polypeptide
  VL of XENP024211

SEQ ID NO: 34282 - protein, 5 aa, Artificial Sequence
  Description of Artificial Sequence: Synthetic peptide
  XENP024211 vhCDR1
HYGMN

SEQ ID NO: 34283 - protein, 17 aa, Artificial Sequence
  Description of Artificial Sequence: Synthetic peptide
  XENP024211 vhCDR2
WINTNTGEPTYADGFTG

SEQ ID NO: 34284 - protein, 8 aa, Artificial Sequence
  Description of Artificial Sequence: Synthetic peptide
  XENP024211 vhCDR3
DYYGSSPY

SEQ ID NO: 34285 - protein, 16 aa, Artificial Sequence
  Description of Artificial Sequence: Synthetic peptide
  XENP024211 vlCDR1
KSSQSIVHSNGNTYLE

SEQ ID NO: 34286 - protein, 7 aa, Artificial Sequence
  Description of Artificial Sequence: Synthetic peptide
  XENP024211 vlCDR2
KVSNRFS

SEQ ID NO: 34287 - protein, 9 aa, Artificial Sequence
  Description of Artificial Sequence: Synthetic peptide
  XENP024211 vlCDR3
FQGSHVPNT

SEQ ID NO: 34288 - protein, 251 aa, Artificial Sequence
  Description of Artificial Sequence: Synthetic polypeptide
  XENP024212 1C11_H3.80_L3_scFv
QIQLVQSGSELKKPGASVKVSCKASGYTFTHYGMNWVRQAPGQGLEWMGWINTNTGEPTYADGFTGRFVFSVDTSQSTAYLQISSLKAEDTAVYYCARDYYGSSPYWGQGTLVTVSSGKPGSGKPGSGKPGSGKPGSDVLMTQSPDSLAVSLGERATINCKSSQSIVHSNGNTYLEWYQQKPGQSPKLLIYKVSNRFSGVPDRFSGSGSGTDFTLTISSLQAEDVAVYYCFQGSHVPNTFGGGTKVEIKGS

SEQ ID NO: 34289 - protein, 117 aa, Artificial Sequence
  Description of Artificial Sequence: Synthetic polypeptide
  VH of XENP024212
QIQLVQSGSELKKPGASVKVSCKASGYTFTHYGMNWVRQAPGQGLEWMGWINTNTGEPTYADGFTGRFVFSVDTSQSTAYLQISSLKAEDTAVYYCARDYYGSSPYWGQGTLVTVSS

SEQ ID NO: 34290 - protein, 114 aa, Artificial Sequence; identical to SEQ ID NO: 33651
  Description of Artificial Sequence: Synthetic polypeptide
  VL of XENP024212

SEQ ID NO: 34291 - protein, 5 aa, Artificial Sequence
  Description of Artificial Sequence: Synthetic peptide
  XENP024212 vhCDR1
HYGMN

SEQ ID NO: 34292 - protein, 17 aa, Artificial Sequence
  Description of Artificial Sequence: Synthetic peptide
  XENP024212 vhCDR2
WINTNTGEPTYADGFTG

SEQ ID NO: 34293 - protein, 8 aa, Artificial Sequence
  Description of Artificial Sequence: Synthetic peptide
  XENP024212 vhCDR3
DYYGSSPY

SEQ ID NO: 34294 - protein, 16 aa, Artificial Sequence
  Description of Artificial Sequence: Synthetic peptide
  XENP024212 vlCDR1
KSSQSIVHSNGNTYLE

SEQ ID NO: 34295 - protein, 7 aa, Artificial Sequence
  Description of Artificial Sequence: Synthetic peptide
  XENP024212 vlCDR2
KVSNRFS

SEQ ID NO: 34296 - protein, 9 aa, Artificial Sequence
  Description of Artificial Sequence: Synthetic peptide
  XENP024212 vlCDR3
FQGSHVPNT

SEQ ID NO: 34297 - protein, 251 aa, Artificial Sequence
  Description of Artificial Sequence: Synthetic polypeptide
  XENP024213 1C11_H3.81_L3_scFv
QIQLVQSGSELKKPGASVKVSCKASGYTFTHYGMNWVRQAPGQGLEWMGWINTYTGEPTYADKFKGRFVFSLDTSVSTAYLQISSLKAEDTAVYFCARDYYGSSPYWGQGTLVTVSSGKPGSGKPGSGKPGSGKPGSDVLMTQSPDSLAVSLGERATINCKSSQSIVHSNGNTYLEWYQQKPGQSPKLLIYKVSNRFSGVPDRFSGSGSGTDFTLTISSLQAEDVAVYYCFQGSHVPNTFGGGTKVEIKGS

SEQ ID NO: 34298 - protein, 117 aa, Artificial Sequence
  Description of Artificial Sequence: Synthetic polypeptide
  VH of XENP024213
QIQLVQSGSELKKPGASVKVSCKASGYTFTHYGMNWVRQAPGQGLEWMGWINTYTGEPTYADKFKGRFVFSLDTSVSTAYLQISSLKAEDTAVYFCARDYYGSSPYWGQGTLVTVSS

SEQ ID NO: 34299 - protein, 114 aa, Artificial Sequence; identical to SEQ ID NO: 33651
  Description of Artificial Sequence: Synthetic polypeptide
  VL of XENP024213

SEQ ID NO: 34300 - protein, 5 aa, Artificial Sequence
  Description of Artificial Sequence: Synthetic peptide
  XENP024213 vhCDR1
HYGMN

SEQ ID NO: 34301 - protein, 17 aa, Artificial Sequence
  Description of Artificial Sequence: Synthetic peptide
  XENP024213 vhCDR2
WINTYTGEPTYADKFKG

SEQ ID NO: 34302 - protein, 8 aa, Artificial Sequence
  Description of Artificial Sequence: Synthetic peptide
  XENP024213 vhCDR3
DYYGSSPY

SEQ ID NO: 34303 - protein, 16 aa, Artificial Sequence
  Description of Artificial Sequence: Synthetic peptide
  XENP024213 vlCDR1
KSSQSIVHSNGNTYLE

SEQ ID NO: 34304 - protein, 7 aa, Artificial Sequence
  Description of Artificial Sequence: Synthetic peptide
  XENP024213 vlCDR2
KVSNRFS

SEQ ID NO: 34305 - protein, 9 aa, Artificial Sequence
  Description of Artificial Sequence: Synthetic peptide
  XENP024213 vlCDR3
FQGSHVPNT

SEQ ID NO: 34306 - protein, 251 aa, Artificial Sequence
  Description of Artificial Sequence: Synthetic polypeptide
  XENP024214 1C11_H3.82_L3_scFv
QIQLVQSGSELKKPGASVKVSCKASGYTFTHYGMNWVRQAPGQGLEWMGWINTYTGEPTYADKFQGRFVFSLDTSVSTAYLQISSLKAEDTAVYFCARDYYGSSPYWGQGTLVTVSSGKPGSGKPGSGKPGSGKPGSDVLMTQSPDSLAVSLGERATINCKSSQSIVHSNGNTYLEWYQQKPGQSPKLLIYKVSNRFSGVPDRFSGSGSGTDFTLTISSLQAEDVAVYYCFQGSHVPNTFGGGTKVEIKGS

SEQ ID NO: 34307 - protein, 117 aa, Artificial Sequence
  Description of Artificial Sequence: Synthetic polypeptide
  VH of XENP024214
QIQLVQSGSELKKPGASVKVSCKASGYTFTHYGMNWVRQAPGQGLEWMGWINTYTGEPTYADKFQGRFVFSLDTSVSTAYLQISSLKAEDTAVYFCARDYYGSSPYWGQGTLVTVSS

SEQ ID NO: 34308 - protein, 114 aa, Artificial Sequence; identical to SEQ ID NO: 33651
  Description of Artificial Sequence: Synthetic polypeptide
  VL of XENP024214

SEQ ID NO: 34309 - protein, 5 aa, Artificial Sequence
  Description of Artificial Sequence: Synthetic peptide
  XENP024214 vhCDR1
HYGMN

SEQ ID NO: 34310 - protein, 17 aa, Artificial Sequence
  Description of Artificial Sequence: Synthetic peptide
  XENP024214 vhCDR2
WINTYTGEPTYADKFQG

SEQ ID NO: 34311 - protein, 8 aa, Artificial Sequence
  Description of Artificial Sequence: Synthetic peptide
  XENP024214 vhCDR3
DYYGSSPY

SEQ ID NO: 34312 - protein, 16 aa, Artificial Sequence
  Description of Artificial Sequence: Synthetic peptide
  XENP024214 vlCDR1
KSSQSIVHSNGNTYLE

SEQ ID NO: 34313 - protein, 7 aa, Artificial Sequence
  Description of Artificial Sequence: Synthetic peptide
  XENP024214 vlCDR2
KVSNRFS

SEQ ID NO: 34314 - protein, 9 aa, Artificial Sequence
  Description of Artificial Sequence: Synthetic peptide
  XENP024214 vlCDR3
FQGSHVPNT

SEQ ID NO: 34315 - protein, 251 aa, Artificial Sequence
  Description of Artificial Sequence: Synthetic polypeptide
  XENP024215 1C11_H3.83_L3_scFv
QIQLVQSGSELKKPGASVKVSCKASGYTFTHYGMNWVRQAPGQGLEWMGWINTNTGEPTYADGFTGRFVFSVDTSQSTAYLQISSLKAEDTAVYFCARDYYGSSPYWGQGTLVTVSSGKPGSGKPGSGKPGSGKPGSDVLMTQSPDSLAVSLGERATINCKSSQSIVHSNGNTYLEWYQQKPGQSPKLLIYKVSNRFSGVPDRFSGSGSGTDFTLTISSLQAEDVAVYYCFQGSHVPNTFGGGTKVEIKGS

SEQ ID NO: 34316 - protein, 117 aa, Artificial Sequence
  Description of Artificial Sequence: Synthetic polypeptide
  VH of XENP024215
QIQLVQSGSELKKPGASVKVSCKASGYTFTHYGMNWVRQAPGQGLEWMGWINTNTGEPTYADGFTGRFVFSVDTSQSTAYLQISSLKAEDTAVYFCARDYYGSSPYWGQGTLVTVSS

SEQ ID NO: 34317 - protein, 114 aa, Artificial Sequence; identical to SEQ ID NO: 33651
  Description of Artificial Sequence: Synthetic polypeptide
  VL of XENP024215

SEQ ID NO: 34318 - protein, 5 aa, Artificial Sequence
  Description of Artificial Sequence: Synthetic peptide
  XENP024215 vhCDR1
HYGMN

SEQ ID NO: 34319 - protein, 17 aa, Artificial Sequence
  Description of Artificial Sequence: Synthetic peptide
  XENP024215 vhCDR2
WINTNTGEPTYADGFTG

SEQ ID NO: 34320 - protein, 8 aa, Artificial Sequence
  Description of Artificial Sequence: Synthetic peptide
  XENP024215 vhCDR3
DYYGSSPY

SEQ ID NO: 34321 - protein, 16 aa, Artificial Sequence
  Description of Artificial Sequence: Synthetic peptide
  XENP024215 vlCDR1
KSSQSIVHSNGNTYLE

SEQ ID NO: 34322 - protein, 7 aa, Artificial Sequence
  Description of Artificial Sequence: Synthetic peptide
  XENP024215 vlCDR2
KVSNRFS

SEQ ID NO: 34323 - protein, 9 aa, Artificial Sequence
  Description of Artificial Sequence: Synthetic peptide
  XENP024215 vlCDR3
FQGSHVPNT

SEQ ID NO: 34324 - protein, 251 aa, Artificial Sequence
  Description of Artificial Sequence: Synthetic polypeptide
  XENP024216 1C11_H3.84_L3_scFv
QIQLVQSGSELKKPGASVKVSCKASGYTFTHYGMNWVRQAPGQGLEWMGWINTYTGEPTYADKFKGRFVFSLDTSQSTAYLQISSLKAEDTAVYFCARDYYGSSPYWGQGTLVTVSSGKPGSGKPGSGKPGSGKPGSDVLMTQSPDSLAVSLGERATINCKSSQSIVHSNGNTYLEWYQQKPGQSPKLLIYKVSNRFSGVPDRFSGSGSGTDFTLTISSLQAEDVAVYYCFQGSHVPNTFGGGTKVEIKGS

SEQ ID NO: 34325 - protein, 117 aa, Artificial Sequence
  Description of Artificial Sequence: Synthetic polypeptide
  VH of XENP024216
QIQLVQSGSELKKPGASVKVSCKASGYTFTHYGMNWVRQAPGQGLEWMGWINTYTGEPTYADKFKGRFVFSLDTSQSTAYLQISSLKAEDTAVYFCARDYYGSSPYWGQGTLVTVSS

SEQ ID NO: 34326 - protein, 114 aa, Artificial Sequence; identical to SEQ ID NO: 33651
  Description of Artificial Sequence: Synthetic polypeptide
  VL of XENP024216

SEQ ID NO: 34327 - protein, 5 aa, Artificial Sequence
  Description of Artificial Sequence: Synthetic peptide
  XENP024216 vhCDR1
HYGMN

SEQ ID NO: 34328 - protein, 17 aa, Artificial Sequence
  Description of Artificial Sequence: Synthetic peptide
  XENP024216 vhCDR2
WINTYTGEPTYADKFKG

SEQ ID NO: 34329 - protein, 8 aa, Artificial Sequence
  Description of Artificial Sequence: Synthetic peptide
  XENP024216 vhCDR3
DYYGSSPY

SEQ ID NO: 34330 - protein, 16 aa, Artificial Sequence
  Description of Artificial Sequence: Synthetic peptide
  XENP024216 vlCDR1
KSSQSIVHSNGNTYLE

SEQ ID NO: 34331 - protein, 7 aa, Artificial Sequence
  Description of Artificial Sequence: Synthetic peptide
  XENP024216 vlCDR2
KVSNRFS

SEQ ID NO: 34332 - protein, 9 aa, Artificial Sequence
  Description of Artificial Sequence: Synthetic peptide
  XENP024216 vlCDR3
FQGSHVPNT

SEQ ID NO: 34333 - protein, 251 aa, Artificial Sequence
  Description of Artificial Sequence: Synthetic polypeptide
  XENP024217 1C11_H3.85_L3_scFv
QIQLVQSGSELKKPGASVKVSCKASGYTFTHYGMNWVRQAPGQGLEWMGWINTYTGEPTYADKFQGRFVFSLDTSQSTAYLQISSLKAEDTAVYFCARDYYGSSPYWGQGTLVTVSSGKPGSGKPGSGKPGSGKPGSDVLMTQSPDSLAVSLGERATINCKSSQSIVHSNGNTYLEWYQQKPGQSPKLLIYKVSNRFSGVPDRFSGSGSGTDFTLTISSLQAEDVAVYYCFQGSHVPNTFGGGTKVEIKGS

SEQ ID NO: 34334 - protein, 117 aa, Artificial Sequence
  Description of Artificial Sequence: Synthetic polypeptide
  VH of XENP024217
QIQLVQSGSELKKPGASVKVSCKASGYTFTHYGMNWVRQAPGQGLEWMGWINTYTGEPTYADKFQGRFVFSLDTSQSTAYLQISSLKAEDTAVYFCARDYYGSSPYWGQGTLVTVSS

SEQ ID NO: 34335 - protein, 114 aa, Artificial Sequence; identical to SEQ ID NO: 33651
  Description of Artificial Sequence: Synthetic polypeptide
  VL of XENP024217

SEQ ID NO: 34336 - protein, 5 aa, Artificial Sequence
  Description of Artificial Sequence: Synthetic peptide
  XENP024217 vhCDR1
HYGMN

SEQ ID NO: 34337 - protein, 17 aa, Artificial Sequence
  Description of Artificial Sequence: Synthetic peptide
  XENP024217 vhCDR2
WINTYTGEPTYADKFQG

SEQ ID NO: 34338 - protein, 8 aa, Artificial Sequence
  Description of Artificial Sequence: Synthetic peptide
  XENP024217 vhCDR3
DYYGSSPY

SEQ ID NO: 34339 - protein, 16 aa, Artificial Sequence
  Description of Artificial Sequence: Synthetic peptide
  XENP024217 vlCDR1
KSSQSIVHSNGNTYLE

SEQ ID NO: 34340 - protein, 7 aa, Artificial Sequence
  Description of Artificial Sequence: Synthetic peptide
  XENP024217 vlCDR2
KVSNRFS

SEQ ID NO: 34341 - protein, 9 aa, Artificial Sequence
  Description of Artificial Sequence: Synthetic peptide
  XENP024217 vlCDR3
FQGSHVPNT

SEQ ID NO: 34342 - protein, 251 aa, Artificial Sequence
  Description of Artificial Sequence: Synthetic polypeptide
  XENP024218 1C11_H3.86_L3_scFv
EIQLVQSGSELKKPGASVKVSCKASGYTFTHYGMNWVRQAPGQGLEWMGWINTYTGEPTYADGFTGRFVFSLDTSVSTAYLQISSLKAEDTAVYFCARDYYGSSPYWGQGTLVTVSSGKPGSGKPGSGKPGSGKPGSDVLMTQSPDSLAVSLGERATINCKSSQSIVHSNGNTYLEWYQQKPGQSPKLLIYKVSNRFSGVPDRFSGSGSGTDFTLTISSLQAEDVAVYYCFQGSHVPNTFGGGTKVEIKGS

SEQ ID NO: 34343 - protein, 117 aa, Artificial Sequence
  Description of Artificial Sequence: Synthetic polypeptide
  VH of XENP024218
EIQLVQSGSELKKPGASVKVSCKASGYTFTHYGMNWVRQAPGQGLEWMGWINTYTGEPTYADGFTGRFVFSLDTSVSTAYLQISSLKAEDTAVYFCARDYYGSSPYWGQGTLVTVSS

SEQ ID NO: 34344 - protein, 114 aa, Artificial Sequence; identical to SEQ ID NO: 33651
  Description of Artificial Sequence: Synthetic polypeptide
  VL of XENP024218

SEQ ID NO: 34345 - protein, 5 aa, Artificial Sequence
  Description of Artificial Sequence: Synthetic peptide
  XENP024218 vhCDR1
HYGMN

SEQ ID NO: 34346 - protein, 17 aa, Artificial Sequence
  Description of Artificial Sequence: Synthetic peptide
  XENP024218 vhCDR2
WINTYTGEPTYADGFTG

SEQ ID NO: 34347 - protein, 8 aa, Artificial Sequence
  Description of Artificial Sequence: Synthetic peptide
  XENP024218 vhCDR3
DYYGSSPY

SEQ ID NO: 34348 - protein, 16 aa, Artificial Sequence
  Description of Artificial Sequence: Synthetic peptide
  XENP024218 vlCDR1
KSSQSIVHSNGNTYLE

SEQ ID NO: 34349 - protein, 7 aa, Artificial Sequence
  Description of Artificial Sequence: Synthetic peptide
  XENP024218 vlCDR2
KVSNRFS

SEQ ID NO: 34350 - protein, 9 aa, Artificial Sequence
  Description of Artificial Sequence: Synthetic peptide
  XENP024218 vlCDR3
FQGSHVPNT

SEQ ID NO: 34351 - protein, 251 aa, Artificial Sequence
  Description of Artificial Sequence: Synthetic polypeptide
  XENP024219 1C11_H3.88_L3_scFv
QIQLVESGSELKKPGASVKVSCKASGYTFTHYGMNWVRQAPGQGLEWMGWINTYTGEPTYADGFTGRFVFSLDTSVSTAYLQISSLKAEDTAVYFCARDYYGSSPYWGQGTLVTVSSGKPGSGKPGSGKPGSGKPGSDVLMTQSPDSLAVSLGERATINCKSSQSIVHSNGNTYLEWYQQKPGQSPKLLIYKVSNRFSGVPDRFSGSGSGTDFTLTISSLQAEDVAVYYCFQGSHVPNTFGGGTKVEIKGS

SEQ ID NO: 34352 - protein, 117 aa, Artificial Sequence
  Description of Artificial Sequence: Synthetic polypeptide
  VH of XENP024219
QIQLVESGSELKKPGASVKVSCKASGYTFTHYGMNWVRQAPGQGLEWMGWINTYTGEPTYADGFTGRFVFSLDTSVSTAYLQISSLKAEDTAVYFCARDYYGSSPYWGQGTLVTVSS

SEQ ID NO: 34353 - protein, 114 aa, Artificial Sequence; identical to SEQ ID NO: 33651
  Description of Artificial Sequence: Synthetic polypeptide
  VL of XENP024219

SEQ ID NO: 34354 - protein, 5 aa, Artificial Sequence
  Description of Artificial Sequence: Synthetic peptide
  XENP024219 vhCDR1
HYGMN

SEQ ID NO: 34355 - protein, 17 aa, Artificial Sequence
  Description of Artificial Sequence: Synthetic peptide
  XENP024219 vhCDR2
WINTYTGEPTYADGFTG

SEQ ID NO: 34356 - protein, 8 aa, Artificial Sequence
  Description of Artificial Sequence: Synthetic peptide
  XENP024219 vhCDR3
DYYGSSPY

SEQ ID NO: 34357 - protein, 16 aa, Artificial Sequence
  Description of Artificial Sequence: Synthetic peptide
  XENP024219 vlCDR1
KSSQSIVHSNGNTYLE

SEQ ID NO: 34358 - protein, 7 aa, Artificial Sequence
  Description of Artificial Sequence: Synthetic peptide
  XENP024219 vlCDR2
KVSNRFS

SEQ ID NO: 34359 - protein, 9 aa, Artificial Sequence
  Description of Artificial Sequence: Synthetic peptide
  XENP024219 vlCDR3
FQGSHVPNT

SEQ ID NO: 34360 - protein, 251 aa, Artificial Sequence
  Description of Artificial Sequence: Synthetic polypeptide
  XENP024220 1C11_H3.89_L3_scFv
QIQLVQSGSGLKKPGASVKVSCKASGYTFTHYGMNWVRQAPGQGLEWMGWINTYTGEPTYADGFTGRFVFSLDTSVSTAYLQISSLKAEDTAVYFCARDYYGSSPYWGQGTLVTVSSGKPGSGKPGSGKPGSGKPGSDVLMTQSPDSLAVSLGERATINCKSSQSIVHSNGNTYLEWYQQKPGQSPKLLIYKVSNRFSGVPDRFSGSGSGTDFTLTISSLQAEDVAVYYCFQGSHVPNTFGGGTKVEIKGS

SEQ ID NO: 34361 - protein, 117 aa, Artificial Sequence
  Description of Artificial Sequence: Synthetic polypeptide
  VH of XENP024220
QIQLVQSGSGLKKPGASVKVSCKASGYTFTHYGMNWVRQAPGQGLEWMGWINTYTGEPTYADGFTGRFVFSLDTSVSTAYLQISSLKAEDTAVYFCARDYYGSSPYWGQGTLVTVSS

SEQ ID NO: 34362 - protein, 114 aa, Artificial Sequence; identical to SEQ ID NO: 33651
  Description of Artificial Sequence: Synthetic polypeptide
  VL of XENP024220

SEQ ID NO: 34363 - protein, 5 aa, Artificial Sequence
  Description of Artificial Sequence: Synthetic peptide
  XENP024220 vhCDR1
HYGMN

SEQ ID NO: 34364 - protein, 17 aa, Artificial Sequence
  Description of Artificial Sequence: Synthetic peptide
  XENP024220 vhCDR2
WINTYTGEPTYADGFTG

SEQ ID NO: 34365 - protein, 8 aa, Artificial Sequence
  Description of Artificial Sequence: Synthetic peptide
  XENP024220 vhCDR3
DYYGSSPY

SEQ ID NO: 34366 - protein, 16 aa, Artificial Sequence
  Description of Artificial Sequence: Synthetic peptide
  XENP024220 vlCDR1
KSSQSIVHSNGNTYLE

SEQ ID NO: 34367 - protein, 7 aa, Artificial Sequence
  Description of Artificial Sequence: Synthetic peptide
  XENP024220 vlCDR2
KVSNRFS

SEQ ID NO: 34368 - protein, 9 aa, Artificial Sequence
  Description of Artificial Sequence: Synthetic peptide
  XENP024220 vlCDR3
FQGSHVPNT

SEQ ID NO: 34369 - protein, 251 aa, Artificial Sequence
  Description of Artificial Sequence: Synthetic polypeptide
  XENP024221 1C11_H3.90_L3_scFv
QIQLVQSGSVLKKPGASVKVSCKASGYTFTHYGMNWVRQAPGQGLEWMGWINTYTGEPTYADGFTGRFVFSLDTSVSTAYLQISSLKAEDTAVYFCARDYYGSSPYWGQGTLVTVSSGKPGSGKPGSGKPGSGKPGSDVLMTQSPDSLAVSLGERATINCKSSQSIVHSNGNTYLEWYQQKPGQSPKLLIYKVSNRFSGVPDRFSGSGSGTDFTLTISSLQAEDVAVYYCFQGSHVPNTFGGGTKVEIKGS

SEQ ID NO: 34370 - protein, 117 aa, Artificial Sequence
  Description of Artificial Sequence: Synthetic polypeptide
  VH of XENP024221
QIQLVQSGSVLKKPGASVKVSCKASGYTFTHYGMNWVRQAPGQGLEWMGWINTYTGEPTYADGFTGRFVFSLDTSVSTAYLQISSLKAEDTAVYFCARDYYGSSPYWGQGTLVTVSS

SEQ ID NO: 34371 - protein, 114 aa, Artificial Sequence; identical to SEQ ID NO: 33651
  Description of Artificial Sequence: Synthetic polypeptide
  VL of XENP024221

SEQ ID NO: 34372 - protein, 5 aa, Artificial Sequence
  Description of Artificial Sequence: Synthetic peptide
  XENP024221 vhCDR1
HYGMN

SEQ ID NO: 34373 - protein, 17 aa, Artificial Sequence
  Description of Artificial Sequence: Synthetic peptide
  XENP024221 vhCDR2
WINTYTGEPTYADGFTG

SEQ ID NO: 34374 - protein, 8 aa, Artificial Sequence
  Description of Artificial Sequence: Synthetic peptide
  XENP024221 vhCDR3
DYYGSSPY

SEQ ID NO: 34375 - protein, 16 aa, Artificial Sequence
  Description of Artificial Sequence: Synthetic peptide
  XENP024221 vlCDR1
KSSQSIVHSNGNTYLE

SEQ ID NO: 34376 - protein, 7 aa, Artificial Sequence
  Description of Artificial Sequence: Synthetic peptide
  XENP024221 vlCDR2
KVSNRFS

SEQ ID NO: 34377 - protein, 9 aa, Artificial Sequence
  Description of Artificial Sequence: Synthetic peptide
  XENP024221 vlCDR3
FQGSHVPNT

SEQ ID NO: 34378 - protein, 251 aa, Artificial Sequence
  Description of Artificial Sequence: Synthetic polypeptide
  XENP024222 1C11_H3.91_L3_scFv
QIQLVQSGSELVKPGASVKVSCKASGYTFTHYGMNWVRQAPGQGLEWMGWINTYTGEPTYADGFTGRFVFSLDTSVSTAYLQISSLKAEDTAVYFCARDYYGSSPYWGQGTLVTVSSGKPGSGKPGSGKPGSGKPGSDVLMTQSPDSLAVSLGERATINCKSSQSIVHSNGNTYLEWYQQKPGQSPKLLIYKVSNRFSGVPDRFSGSGSGTDFTLTISSLQAEDVAVYYCFQGSHVPNTFGGGTKVEIKGS

SEQ ID NO: 34379 - protein, 117 aa, Artificial Sequence
  Description of Artificial Sequence: Synthetic polypeptide
  VH of XENP024222
QIQLVQSGSELVKPGASVKVSCKASGYTFTHYGMNWVRQAPGQGLEWMGWINTYTGEPTYADGFTGRFVFSLDTSVSTAYLQISSLKAEDTAVYFCARDYYGSSPYWGQGTLVTVSS

SEQ ID NO: 34380 - protein, 114 aa, Artificial Sequence; identical to SEQ ID NO: 33651
  Description of Artificial Sequence: Synthetic polypeptide
  VL of XENP024222

SEQ ID NO: 34381 - protein, 5 aa, Artificial Sequence
  Description of Artificial Sequence: Synthetic peptide
  XENP024222 vhCDR1
HYGMN

SEQ ID NO: 34382 - protein, 17 aa, Artificial Sequence
  Description of Artificial Sequence: Synthetic peptide
  XENP024222 vhCDR2
WINTYTGEPTYADGFTG

SEQ ID NO: 34383 - protein, 8 aa, Artificial Sequence
  Description of Artificial Sequence: Synthetic peptide
  XENP024222 vhCDR3
DYYGSSPY

SEQ ID NO: 34384 - protein, 16 aa, Artificial Sequence
  Description of Artificial Sequence: Synthetic peptide
  XENP024222 vlCDR1
KSSQSIVHSNGNTYLE

SEQ ID NO: 34385 - protein, 7 aa, Artificial Sequence
  Description of Artificial Sequence: Synthetic peptide
  XENP024222 vlCDR2
KVSNRFS

SEQ ID NO: 34386 - protein, 9 aa, Artificial Sequence
  Description of Artificial Sequence: Synthetic peptide
  XENP024222 vlCDR3
FQGSHVPNT

SEQ ID NO: 34387 - protein, 251 aa, Artificial Sequence
  Description of Artificial Sequence: Synthetic polypeptide
  XENP024223 1C11_H3.92_L3_scFv
QIQLVQSGSELKQPGASVKVSCKASGYTFTHYGMNWVRQAPGQGLEWMGWINTYTGEPTYADGFTGRFVFSLDTSVSTAYLQISSLKAEDTAVYFCARDYYGSSPYWGQGTLVTVSSGKPGSGKPGSGKPGSGKPGSDVLMTQSPDSLAVSLGERATINCKSSQSIVHSNGNTYLEWYQQKPGQSPKLLIYKVSNRFSGVPDRFSGSGSGTDFTLTISSLQAEDVAVYYCFQGSHVPNTFGGGTKVEIKGS

SEQ ID NO: 34388 - protein, 117 aa, Artificial Sequence
  Description of Artificial Sequence: Synthetic polypeptide
  VH of XENP024223
QIQLVQSGSELKQPGASVKVSCKASGYTFTHYGMNWVRQAPGQGLEWMGWINTYTGEPTYADGFTGRFVFSLDTSVSTAYLQISSLKAEDTAVYFCARDYYGSSPYWGQGTLVTVSS

SEQ ID NO: 34389 - protein, 114 aa, Artificial Sequence; identical to SEQ ID NO: 33651
  Description of Artificial Sequence: Synthetic polypeptide
  VL of XENP024223

SEQ ID NO: 34390 - protein, 5 aa, Artificial Sequence
  Description of Artificial Sequence: Synthetic peptide
  XENP024223 vhCDR1
HYGMN

SEQ ID NO: 34391 - protein, 17 aa, Artificial Sequence
  Description of Artificial Sequence: Synthetic peptide
  XENP024223 vhCDR2
WINTYTGEPTYADGFTG

SEQ ID NO: 34392 - protein, 8 aa, Artificial Sequence
  Description of Artificial Sequence: Synthetic peptide
  XENP024223 vhCDR3
DYYGSSPY

SEQ ID NO: 34393 - protein, 16 aa, Artificial Sequence
  Description of Artificial Sequence: Synthetic peptide
  XENP024223 vlCDR1
KSSQSIVHSNGNTYLE

SEQ ID NO: 34394 - protein, 7 aa, Artificial Sequence
  Description of Artificial Sequence: Synthetic peptide
  XENP024223 vlCDR2
KVSNRFS

SEQ ID NO: 34395 - protein, 9 aa, Artificial Sequence
  Description of Artificial Sequence: Synthetic peptide
  XENP024223 vlCDR3
FQGSHVPNT

SEQ ID NO: 34396 - protein, 251 aa, Artificial Sequence
  Description of Artificial Sequence: Synthetic polypeptide
  XENP024224 1C11_H3.93_L3_scFv
QIQLVQSGSELKKPSASVKVSCKASGYTFTHYGMNWVRQAPGQGLEWMGWINTYTGEPTYADGFTGRFVFSLDTSVSTAYLQISSLKAEDTAVYFCARDYYGSSPYWGQGTLVTVSSGKPGSGKPGSGKPGSGKPGSDVLMTQSPDSLAVSLGERATINCKSSQSIVHSNGNTYLEWYQQKPGQSPKLLIYKVSNRFSGVPDRFSGSGSGTDFTLTISSLQAEDVAVYYCFQGSHVPNTFGGGTKVEIKGS

SEQ ID NO: 34397 - protein, 117 aa, Artificial Sequence
  Description of Artificial Sequence: Synthetic polypeptide
  VH of XENP024224
QIQLVQSGSELKKPSASVKVSCKASGYTFTHYGMNWVRQAPGQGLEWMGWINTYTGEPTYADGFTGRFVFSLDTSVSTAYLQISSLKAEDTAVYFCARDYYGSSPYWGQGTLVTVSS

SEQ ID NO: 34398 - protein, 114 aa, Artificial Sequence; identical to SEQ ID NO: 33651
  Description of Artificial Sequence: Synthetic polypeptide
  VL of XENP024224

SEQ ID NO: 34399 - protein, 5 aa, Artificial Sequence
  Description of Artificial Sequence: Synthetic peptide
  XENP024224 vhCDR1
HYGMN

SEQ ID NO: 34400 - protein, 17 aa, Artificial Sequence
  Description of Artificial Sequence: Synthetic peptide
  XENP024224 vhCDR2
WINTYTGEPTYADGFTG

SEQ ID NO: 34401 - protein, 8 aa, Artificial Sequence
  Description of Artificial Sequence: Synthetic peptide
  XENP024224 vhCDR3
DYYGSSPY

SEQ ID NO: 34402 - protein, 16 aa, Artificial Sequence
  Description of Artificial Sequence: Synthetic peptide
  XENP024224 vlCDR1
KSSQSIVHSNGNTYLE

SEQ ID NO: 34403 - protein, 7 aa, Artificial Sequence
  Description of Artificial Sequence: Synthetic peptide
  XENP024224 vlCDR2
KVSNRFS

SEQ ID NO: 34404 - protein, 9 aa, Artificial Sequence
  Description of Artificial Sequence: Synthetic peptide
  XENP024224 vlCDR3
FQGSHVPNT

SEQ ID NO: 34405 - protein, 251 aa, Artificial Sequence
  Description of Artificial Sequence: Synthetic polypeptide
  XENP024225 1C11_H3.94_L3_scFv
QIQLVQSGSELKKPTASVKVSCKASGYTFTHYGMNWVRQAPGQGLEWMGWINTYTGEPTYADGFTGRFVFSLDTSVSTAYLQISSLKAEDTAVYFCARDYYGSSPYWGQGTLVTVSSGKPGSGKPGSGKPGSGKPGSDVLMTQSPDSLAVSLGERATINCKSSQSIVHSNGNTYLEWYQQKPGQSPKLLIYKVSNRFSGVPDRFSGSGSGTDFTLTISSLQAEDVAVYYCFQGSHVPNTFGGGTKVEIKGS

SEQ ID NO: 34406 - protein, 117 aa, Artificial Sequence
  Description of Artificial Sequence: Synthetic polypeptide
  VH of XENP024225
QIQLVQSGSELKKPTASVKVSCKASGYTFTHYGMNWVRQAPGQGLEWMGWINTYTGEPTYADGFTGRFVFSLDTSVSTAYLQISSLKAEDTAVYFCARDYYGSSPYWGQGTLVTVSS

SEQ ID NO: 34407 - protein, 114 aa, Artificial Sequence; identical to SEQ ID NO: 33651
  Description of Artificial Sequence: Synthetic polypeptide
  VL of XENP024225

SEQ ID NO: 34408 - protein, 5 aa, Artificial Sequence
  Description of Artificial Sequence: Synthetic peptide
  XENP024225 vhCDR1
HYGMN

SEQ ID NO: 34409 - protein, 17 aa, Artificial Sequence
  Description of Artificial Sequence: Synthetic peptide
  XENP024225 vhCDR2
WINTYTGEPTYADGFTG

SEQ ID NO: 34410 - protein, 8 aa, Artificial Sequence
  Description of Artificial Sequence: Synthetic peptide
  XENP024225 vhCDR3
DYYGSSPY

SEQ ID NO: 34411 - protein, 16 aa, Artificial Sequence
  Description of Artificial Sequence: Synthetic peptide
  XENP024225 vlCDR1
KSSQSIVHSNGNTYLE

SEQ ID NO: 34412 - protein, 7 aa, Artificial Sequence
  Description of Artificial Sequence: Synthetic peptide
  XENP024225 vlCDR2
KVSNRFS

SEQ ID NO: 34413 - protein, 9 aa, Artificial Sequence
  Description of Artificial Sequence: Synthetic peptide
  XENP024225 vlCDR3
FQGSHVPNT

SEQ ID NO: 34414 - protein, 251 aa, Artificial Sequence
  Description of Artificial Sequence: Synthetic polypeptide
  XENP024226 1C11_H3.95_L3_scFv
QIQLVQSGSELKKPGGSVKVSCKASGYTFTHYGMNWVRQAPGQGLEWMGWINTYTGEPTYADGFTGRFVFSLDTSVSTAYLQISSLKAEDTAVYFCARDYYGSSPYWGQGTLVTVSSGKPGSGKPGSGKPGSGKPGSDVLMTQSPDSLAVSLGERATINCKSSQSIVHSNGNTYLEWYQQKPGQSPKLLIYKVSNRFSGVPDRFSGSGSGTDFTLTISSLQAEDVAVYYCFQGSHVPNTFGGGTKVEIKGS

SEQ ID NO: 34415 - protein, 117 aa, Artificial Sequence
  Description of Artificial Sequence: Synthetic polypeptide
  VH of XENP024226
QIQLVQSGSELKKPGGSVKVSCKASGYTFTHYGMNWVRQAPGQGLEWMGWINTYTGEPTYADGFTGRFVFSLDTSVSTAYLQISSLKAEDTAVYFCARDYYGSSPYWGQGTLVTVSS

SEQ ID NO: 34416 - protein, 114 aa, Artificial Sequence; identical to SEQ ID NO: 33651
  Description of Artificial Sequence: Synthetic polypeptide
  VL of XENP024226

SEQ ID NO: 34417 - protein, 5 aa, Artificial Sequence
  Description of Artificial Sequence: Synthetic peptide
  XENP024226 vhCDR1
HYGMN

SEQ ID NO: 34418 - protein, 17 aa, Artificial Sequence
  Description of Artificial Sequence: Synthetic peptide
  XENP024226 vhCDR2
WINTYTGEPTYADGFTG

SEQ ID NO: 34419 - protein, 8 aa, Artificial Sequence
  Description of Artificial Sequence: Synthetic peptide
  XENP024226 vhCDR3
DYYGSSPY

SEQ ID NO: 34420 - protein, 16 aa, Artificial Sequence
  Description of Artificial Sequence: Synthetic peptide
  XENP024226 vlCDR1
KSSQSIVHSNGNTYLE

SEQ ID NO: 34421 - protein, 7 aa, Artificial Sequence
  Description of Artificial Sequence: Synthetic peptide
  XENP024226 vlCDR2
KVSNRFS

SEQ ID NO: 34422 - protein, 9 aa, Artificial Sequence
  Description of Artificial Sequence: Synthetic peptide
  XENP024226 vlCDR3
FQGSHVPNT

SEQ ID NO: 34423 - protein, 251 aa, Artificial Sequence
  Description of Artificial Sequence: Synthetic polypeptide
  XENP024227 1C11_H3.96_L3_scFv
QIQLVQSGSELKKPGQSVKVSCKASGYTFTHYGMNWVRQAPGQGLEWMGWINTYTGEPTYADGFTGRFVFSLDTSVSTAYLQISSLKAEDTAVYFCARDYYGSSPYWGQGTLVTVSSGKPGSGKPGSGKPGSGKPGSDVLMTQSPDSLAVSLGERATINCKSSQSIVHSNGNTYLEWYQQKPGQSPKLLIYKVSNRFSGVPDRFSGSGSGTDFTLTISSLQAEDVAVYYCFQGSHVPNTFGGGTKVEIKGS

SEQ ID NO: 34424 - protein, 117 aa, Artificial Sequence
  Description of Artificial Sequence: Synthetic polypeptide
  VH of XENP024227
QIQLVQSGSELKKPGQSVKVSCKASGYTFTHYGMNWVRQAPGQGLEWMGWINTYTGEPTYADGFTGRFVFSLDTSVSTAYLQISSLKAEDTAVYFCARDYYGSSPYWGQGTLVTVSS

SEQ ID NO: 34425 - protein, 114 aa, Artificial Sequence; identical to SEQ ID NO: 33651
  Description of Artificial Sequence: Synthetic polypeptide
  VL of XENP024227

SEQ ID NO: 34426 - protein, 5 aa, Artificial Sequence
  Description of Artificial Sequence: Synthetic peptide
  XENP024227 vhCDR1
HYGMN

SEQ ID NO: 34427 - protein, 17 aa, Artificial Sequence
  Description of Artificial Sequence: Synthetic peptide
  XENP024227 vhCDR2
WINTYTGEPTYADGFTG

SEQ ID NO: 34428 - protein, 8 aa, Artificial Sequence
  Description of Artificial Sequence: Synthetic peptide
  XENP024227 vhCDR3
DYYGSSPY

SEQ ID NO: 34429 - protein, 16 aa, Artificial Sequence
  Description of Artificial Sequence: Synthetic peptide
  XENP024227 vlCDR1
KSSQSIVHSNGNTYLE

SEQ ID NO: 34430 - protein, 7 aa, Artificial Sequence
  Description of Artificial Sequence: Synthetic peptide
  XENP024227 vlCDR2
KVSNRFS

SEQ ID NO: 34431 - protein, 9 aa, Artificial Sequence
  Description of Artificial Sequence: Synthetic peptide
  XENP024227 vlCDR3
FQGSHVPNT

SEQ ID NO: 34432 - protein, 251 aa, Artificial Sequence
  Description of Artificial Sequence: Synthetic polypeptide
  XENP024228 1C11_H3.97_L3_scFv
QIQLVQSGSELKKPGESVKVSCKASGYTFTHYGMNWVRQAPGQGLEWMGWINTYTGEPTYADGFTGRFVFSLDTSVSTAYLQISSLKAEDTAVYFCARDYYGSSPYWGQGTLVTVSSGKPGSGKPGSGKPGSGKPGSDVLMTQSPDSLAVSLGERATINCKSSQSIVHSNGNTYLEWYQQKPGQSPKLLIYKVSNRFSGVPDRFSGSGSGTDFTLTISSLQAEDVAVYYCFQGSHVPNTFGGGTKVEIKGS

SEQ ID NO: 34433 - protein, 117 aa, Artificial Sequence
  Description of Artificial Sequence: Synthetic polypeptide
  VH of XENP024228
QIQLVQSGSELKKPGESVKVSCKASGYTFTHYGMNWVRQAPGQGLEWMGWINTYTGEPTYADGFTGRFVFSLDTSVSTAYLQISSLKAEDTAVYFCARDYYGSSPYWGQGTLVTVSS

SEQ ID NO: 34434 - protein, 114 aa, Artificial Sequence; identical to SEQ ID NO: 33651
  Description of Artificial Sequence: Synthetic polypeptide
  VL of XENP024228

SEQ ID NO: 34435 - protein, 5 aa, Artificial Sequence
  Description of Artificial Sequence: Synthetic peptide
  XENP024228 vhCDR1
HYGMN

SEQ ID NO: 34436 - protein, 17 aa, Artificial Sequence
  Description of Artificial Sequence: Synthetic peptide
  XENP024228 vhCDR2
WINTYTGEPTYADGFTG

SEQ ID NO: 34437 - protein, 8 aa, Artificial Sequence
  Description of Artificial Sequence: Synthetic peptide
  XENP024228 vhCDR3
DYYGSSPY

SEQ ID NO: 34438 - protein, 16 aa, Artificial Sequence
  Description of Artificial Sequence: Synthetic peptide
  XENP024228 vlCDR1
KSSQSIVHSNGNTYLE

SEQ ID NO: 34439 - protein, 7 aa, Artificial Sequence
  Description of Artificial Sequence: Synthetic peptide
  XENP024228 vlCDR2
KVSNRFS

SEQ ID NO: 34440 - protein, 9 aa, Artificial Sequence
  Description of Artificial Sequence: Synthetic peptide
  XENP024228 vlCDR3
FQGSHVPNT

SEQ ID NO: 34441 - protein, 251 aa, Artificial Sequence
  Description of Artificial Sequence: Synthetic polypeptide
  XENP024229 1C11_H3.98_L3_scFv
QIQLVQSGSELKKPGRSVKVSCKASGYTFTHYGMNWVRQAPGQGLEWMGWINTYTGEPTYADGFTGRFVFSLDTSVSTAYLQISSLKAEDTAVYFCARDYYGSSPYWGQGTLVTVSSGKPGSGKPGSGKPGSGKPGSDVLMTQSPDSLAVSLGERATINCKSSQSIVHSNGNTYLEWYQQKPGQSPKLLIYKVSNRFSGVPDRFSGSGSGTDFTLTISSLQAEDVAVYYCFQGSHVPNTFGGGTKVEIKGS

SEQ ID NO: 34442 - protein, 117 aa, Artificial Sequence
  Description of Artificial Sequence: Synthetic polypeptide
  VH of XENP024229
QIQLVQSGSELKKPGRSVKVSCKASGYTFTHYGMNWVRQAPGQGLEWMGWINTYTGEPTYADGFTGRFVFSLDTSVSTAYLQISSLKAEDTAVYFCARDYYGSSPYWGQGTLVTVSS

SEQ ID NO: 34443 - protein, 114 aa, Artificial Sequence; identical to SEQ ID NO: 33651
  Description of Artificial Sequence: Synthetic polypeptide
  VL of XENP024229

SEQ ID NO: 34444 - protein, 5 aa, Artificial Sequence
  Description of Artificial Sequence: Synthetic peptide
  XENP024229 vhCDR1
HYGMN

SEQ ID NO: 34445 - protein, 17 aa, Artificial Sequence
  Description of Artificial Sequence: Synthetic peptide
  XENP024229 vhCDR2
WINTYTGEPTYADGFTG

SEQ ID NO: 34446 - protein, 8 aa, Artificial Sequence
  Description of Artificial Sequence: Synthetic peptide
  XENP024229 vhCDR3
DYYGSSPY

SEQ ID NO: 34447 - protein, 16 aa, Artificial Sequence
  Description of Artificial Sequence: Synthetic peptide
  XENP024229 vlCDR1
KSSQSIVHSNGNTYLE

SEQ ID NO: 34448 - protein, 7 aa, Artificial Sequence
  Description of Artificial Sequence: Synthetic peptide
  XENP024229 vlCDR2
KVSNRFS

SEQ ID NO: 34449 - protein, 9 aa, Artificial Sequence
  Description of Artificial Sequence: Synthetic peptide
  XENP024229 vlCDR3
FQGSHVPNT

SEQ ID NO: 34450 - protein, 251 aa, Artificial Sequence
  Description of Artificial Sequence: Synthetic polypeptide
  XENP024230 1C11_H3.99_L3_scFv
QIQLVQSGSELKKPGATVKVSCKASGYTFTHYGMNWVRQAPGQGLEWMGWINTYTGEPTYADGFTGRFVFSLDTSVSTAYLQISSLKAEDTAVYFCARDYYGSSPYWGQGTLVTVSSGKPGSGKPGSGKPGSGKPGSDVLMTQSPDSLAVSLGERATINCKSSQSIVHSNGNTYLEWYQQKPGQSPKLLIYKVSNRFSGVPDRFSGSGSGTDFTLTISSLQAEDVAVYYCFQGSHVPNTFGGGTKVEIKGS

SEQ ID NO: 34451 - protein, 117 aa, Artificial Sequence
  Description of Artificial Sequence: Synthetic polypeptide
  VH of XENP024230
QIQLVQSGSELKKPGATVKVSCKASGYTFTHYGMNWVRQAPGQGLEWMGWINTYTGEPTYADGFTGRFVFSLDTSVSTAYLQISSLKAEDTAVYFCARDYYGSSPYWGQGTLVTVSS

SEQ ID NO: 34452 - protein, 114 aa, Artificial Sequence; identical to SEQ ID NO: 33651
  Description of Artificial Sequence: Synthetic polypeptide
  VL of XENP024230

SEQ ID NO: 34453 - protein, 5 aa, Artificial Sequence
  Description of Artificial Sequence: Synthetic peptide
  XENP024230 vhCDR1
HYGMN

SEQ ID NO: 34454 - protein, 17 aa, Artificial Sequence
  Description of Artificial Sequence: Synthetic peptide
  XENP024230 vhCDR2
WINTYTGEPTYADGFTG

SEQ ID NO: 34455 - protein, 8 aa, Artificial Sequence
  Description of Artificial Sequence: Synthetic peptide
  XENP024230 vhCDR3
DYYGSSPY

SEQ ID NO: 34456 - protein, 16 aa, Artificial Sequence
  Description of Artificial Sequence: Synthetic peptide
  XENP024230 vlCDR1
KSSQSIVHSNGNTYLE

SEQ ID NO: 34457 - protein, 7 aa, Artificial Sequence
  Description of Artificial Sequence: Synthetic peptide
  XENP024230 vlCDR2
KVSNRFS

SEQ ID NO: 34458 - protein, 9 aa, Artificial Sequence
  Description of Artificial Sequence: Synthetic peptide
  XENP024230 vlCDR3
FQGSHVPNT

SEQ ID NO: 34459 - protein, 251 aa, Artificial Sequence
  Description of Artificial Sequence: Synthetic polypeptide
  XENP024231 1C11_H3.100_L3_scFv
QIQLVQSGSELKKPGASLKVSCKASGYTFTHYGMNWVRQAPGQGLEWMGWINTYTGEPTYADGFTGRFVFSLDTSVSTAYLQISSLKAEDTAVYFCARDYYGSSPYWGQGTLVTVSSGKPGSGKPGSGKPGSGKPGSDVLMTQSPDSLAVSLGERATINCKSSQSIVHSNGNTYLEWYQQKPGQSPKLLIYKVSNRFSGVPDRFSGSGSGTDFTLTISSLQAEDVAVYYCFQGSHVPNTFGGGTKVEIKGS

SEQ ID NO: 34460 - protein, 117 aa, Artificial Sequence
  Description of Artificial Sequence: Synthetic polypeptide
  VH of XENP024231
QIQLVQSGSELKKPGASLKVSCKASGYTFTHYGMNWVRQAPGQGLEWMGWINTYTGEPTYADGFTGRFVFSLDTSVSTAYLQISSLKAEDTAVYFCARDYYGSSPYWGQGTLVTVSS

SEQ ID NO: 34461 - protein, 114 aa, Artificial Sequence; identical to SEQ ID NO: 33651
  Description of Artificial Sequence: Synthetic polypeptide
  VL of XENP024231

SEQ ID NO: 34462 - protein, 5 aa, Artificial Sequence
  Description of Artificial Sequence: Synthetic peptide
  XENP024231 vhCDR1
HYGMN

SEQ ID NO: 34463 - protein, 17 aa, Artificial Sequence
  Description of Artificial Sequence: Synthetic peptide
  XENP024231 vhCDR2
WINTYTGEPTYADGFTG

SEQ ID NO: 34464 - protein, 8 aa, Artificial Sequence
  Description of Artificial Sequence: Synthetic peptide
  XENP024231 vhCDR3
DYYGSSPY

SEQ ID NO: 34465 - protein, 16 aa, Artificial Sequence
  Description of Artificial Sequence: Synthetic peptide
  XENP024231 vlCDR1
KSSQSIVHSNGNTYLE

SEQ ID NO: 34466 - protein, 7 aa, Artificial Sequence
  Description of Artificial Sequence: Synthetic peptide
  XENP024231 vlCDR2
KVSNRFS

SEQ ID NO: 34467 - protein, 9 aa, Artificial Sequence
  Description of Artificial Sequence: Synthetic peptide
  XENP024231 vlCDR3
FQGSHVPNT

SEQ ID NO: 34468 - protein, 251 aa, Artificial Sequence
  Description of Artificial Sequence: Synthetic polypeptide
  XENP024232 1C11_H3.101_L3_scFv
QIQLVQSGSELKKPGASVRVSCKASGYTFTHYGMNWVRQAPGQGLEWMGWINTYTGEPTYADGFTGRFVFSLDTSVSTAYLQISSLKAEDTAVYFCARDYYGSSPYWGQGTLVTVSSGKPGSGKPGSGKPGSGKPGSDVLMTQSPDSLAVSLGERATINCKSSQSIVHSNGNTYLEWYQQKPGQSPKLLIYKVSNRFSGVPDRFSGSGSGTDFTLTISSLQAEDVAVYYCFQGSHVPNTFGGGTKVEIKGS

SEQ ID NO: 34469 - protein, 117 aa, Artificial Sequence
  Description of Artificial Sequence: Synthetic polypeptide
  VH of XENP024232
QIQLVQSGSELKKPGASVRVSCKASGYTFTHYGMNWVRQAPGQGLEWMGWINTYTGEPTYADGFTGRFVFSLDTSVSTAYLQISSLKAEDTAVYFCARDYYGSSPYWGQGTLVTVSS

SEQ ID NO: 34470 - protein, 114 aa, Artificial Sequence; identical to SEQ ID NO: 33651
  Description of Artificial Sequence: Synthetic polypeptide
  VL of XENP024232

SEQ ID NO: 34471 - protein, 5 aa, Artificial Sequence
  Description of Artificial Sequence: Synthetic peptide
  XENP024232 vhCDR1
HYGMN

SEQ ID NO: 34472 - protein, 17 aa, Artificial Sequence
  Description of Artificial Sequence: Synthetic peptide
  XENP024232 vhCDR2
WINTYTGEPTYADGFTG

SEQ ID NO: 34473 - protein, 8 aa, Artificial Sequence
  Description of Artificial Sequence: Synthetic peptide
  XENP024232 vhCDR3
DYYGSSPY

SEQ ID NO: 34474 - protein, 16 aa, Artificial Sequence
  Description of Artificial Sequence: Synthetic peptide
  XENP024232 vlCDR1
KSSQSIVHSNGNTYLE

SEQ ID NO: 34475 - protein, 7 aa, Artificial Sequence
  Description of Artificial Sequence: Synthetic peptide
  XENP024232 vlCDR2
KVSNRFS

SEQ ID NO: 34476 - protein, 9 aa, Artificial Sequence
  Description of Artificial Sequence: Synthetic peptide
  XENP024232 vlCDR3
FQGSHVPNT

SEQ ID NO: 34477 - protein, 251 aa, Artificial Sequence
  Description of Artificial Sequence: Synthetic polypeptide
  XENP024233 1C11_H3.102_L3_scFv
QIQLVQSGSELKKPGASVSVSCKASGYTFTHYGMNWVRQAPGQGLEWMGWINTYTGEPTYADGFTGRFVFSLDTSVSTAYLQISSLKAEDTAVYFCARDYYGSSPYWGQGTLVTVSSGKPGSGKPGSGKPGSGKPGSDVLMTQSPDSLAVSLGERATINCKSSQSIVHSNGNTYLEWYQQKPGQSPKLLIYKVSNRFSGVPDRFSGSGSGTDFTLTISSLQAEDVAVYYCFQGSHVPNTFGGGTKVEIKGS

SEQ ID NO: 34478 - protein, 117 aa, Artificial Sequence
  Description of Artificial Sequence: Synthetic polypeptide
  VH of XENP024233
QIQLVQSGSELKKPGASVSVSCKASGYTFTHYGMNWVRQAPGQGLEWMGWINTYTGEPTYADGFTGRFVFSLDTSVSTAYLQISSLKAEDTAVYFCARDYYGSSPYWGQGTLVTVSS

SEQ ID NO: 34479 - protein, 114 aa, Artificial Sequence; identical to SEQ ID NO: 33651
  Description of Artificial Sequence: Synthetic polypeptide
  VL of XENP024233

SEQ ID NO: 34480 - protein, 5 aa, Artificial Sequence
  Description of Artificial Sequence: Synthetic peptide
  XENP024233 vhCDR1
HYGMN

SEQ ID NO: 34481 - protein, 17 aa, Artificial Sequence
  Description of Artificial Sequence: Synthetic peptide
  XENP024233 vhCDR2
WINTYTGEPTYADGFTG

SEQ ID NO: 34482 - protein, 8 aa, Artificial Sequence
  Description of Artificial Sequence: Synthetic peptide
  XENP024233 vhCDR3
DYYGSSPY

SEQ ID NO: 34483 - protein, 16 aa, Artificial Sequence
  Description of Artificial Sequence: Synthetic peptide
  XENP024233 vlCDR1
KSSQSIVHSNGNTYLE

SEQ ID NO: 34484 - protein, 7 aa, Artificial Sequence
  Description of Artificial Sequence: Synthetic peptide
  XENP024233 vlCDR2
KVSNRFS

SEQ ID NO: 34485 - protein, 9 aa, Artificial Sequence
  Description of Artificial Sequence: Synthetic peptide
  XENP024233 vlCDR3
FQGSHVPNT

SEQ ID NO: 34486 - protein, 251 aa, Artificial Sequence
  Description of Artificial Sequence: Synthetic polypeptide
  XENP024234 1C11_H3.103_L3_scFv
QIQLVQSGSELKKPGASVKVTCKASGYTFTHYGMNWVRQAPGQGLEWMGWINTYTGEPTYADGFTGRFVFSLDTSVSTAYLQISSLKAEDTAVYFCARDYYGSSPYWGQGTLVTVSSGKPGSGKPGSGKPGSGKPGSDVLMTQSPDSLAVSLGERATINCKSSQSIVHSNGNTYLEWYQQKPGQSPKLLIYKVSNRFSGVPDRFSGSGSGTDFTLTISSLQAEDVAVYYCFQGSHVPNTFGGGTKVEIKGS

SEQ ID NO: 34487 - protein, 117 aa, Artificial Sequence
  Description of Artificial Sequence: Synthetic polypeptide
  VH of XENP024234
QIQLVQSGSELKKPGASVKVTCKASGYTFTHYGMNWVRQAPGQGLEWMGWINTYTGEPTYADGFTGRFVFSLDTSVSTAYLQISSLKAEDTAVYFCARDYYGSSPYWGQGTLVTVSS

SEQ ID NO: 34488 - protein, 114 aa, Artificial Sequence; identical to SEQ ID NO: 33651
  Description of Artificial Sequence: Synthetic polypeptide
  VL of XENP024234

SEQ ID NO: 34489 - protein, 5 aa, Artificial Sequence
  Description of Artificial Sequence: Synthetic peptide
  XENP024234 vhCDR1
HYGMN

SEQ ID NO: 34490 - protein, 17 aa, Artificial Sequence
  Description of Artificial Sequence: Synthetic peptide
  XENP024234 vhCDR2
WINTYTGEPTYADGFTG

SEQ ID NO: 34491 - protein, 8 aa, Artificial Sequence
  Description of Artificial Sequence: Synthetic peptide
  XENP024234 vhCDR3
DYYGSSPY

SEQ ID NO: 34492 - protein, 16 aa, Artificial Sequence
  Description of Artificial Sequence: Synthetic peptide
  XENP024234 vlCDR1
KSSQSIVHSNGNTYLE

SEQ ID NO: 34493 - protein, 7 aa, Artificial Sequence
  Description of Artificial Sequence: Synthetic peptide
  XENP024234 vlCDR2
KVSNRFS

SEQ ID NO: 34494 - protein, 9 aa, Artificial Sequence
  Description of Artificial Sequence: Synthetic peptide
  XENP024234 vlCDR3
FQGSHVPNT

SEQ ID NO: 34495 - protein, 251 aa, Artificial Sequence
  Description of Artificial Sequence: Synthetic polypeptide
  XENP024235 1C11_H3.104_L3_scFv
QIQLVQSGSELKKPGASVKVSCAASGYTFTHYGMNWVRQAPGQGLEWMGWINTYTGEPTYADGFTGRFVFSLDTSVSTAYLQISSLKAEDTAVYFCARDYYGSSPYWGQGTLVTVSSGKPGSGKPGSGKPGSGKPGSDVLMTQSPDSLAVSLGERATINCKSSQSIVHSNGNTYLEWYQQKPGQSPKLLIYKVSNRFSGVPDRFSGSGSGTDFTLTISSLQAEDVAVYYCFQGSHVPNTFGGGTKVEIKGS

SEQ ID NO: 34496 - protein, 117 aa, Artificial Sequence
  Description of Artificial Sequence: Synthetic polypeptide
  VH of XENP024235
QIQLVQSGSELKKPGASVKVSCAASGYTFTHYGMNWVRQAPGQGLEWMGWINTYTGEPTYADGFTGRFVFSLDTSVSTAYLQISSLKAEDTAVYFCARDYYGSSPYWGQGTLVTVSS

SEQ ID NO: 34497 - protein, 114 aa, Artificial Sequence; identical to SEQ ID NO: 33651
  Description of Artificial Sequence: Synthetic polypeptide
  VL of XENP024235

SEQ ID NO: 34498 - protein, 5 aa, Artificial Sequence
  Description of Artificial Sequence: Synthetic peptide
  XENP024235 vhCDR1
HYGMN

SEQ ID NO: 34499 - protein, 17 aa, Artificial Sequence
  Description of Artificial Sequence: Synthetic peptide
  XENP024235 vhCDR2
WINTYTGEPTYADGFTG

SEQ ID NO: 34500 - protein, 8 aa, Artificial Sequence
  Description of Artificial Sequence: Synthetic peptide
  XENP024235 vhCDR3
DYYGSSPY

SEQ ID NO: 34501 - protein, 16 aa, Artificial Sequence
  Description of Artificial Sequence: Synthetic peptide
  XENP024235 vlCDR1
KSSQSIVHSNGNTYLE

SEQ ID NO: 34502 - protein, 7 aa, Artificial Sequence
  Description of Artificial Sequence: Synthetic peptide
  XENP024235 vlCDR2
KVSNRFS

SEQ ID NO: 34503 - protein, 9 aa, Artificial Sequence
  Description of Artificial Sequence: Synthetic peptide
  XENP024235 vlCDR3
FQGSHVPNT

SEQ ID NO: 34504 - protein, 251 aa, Artificial Sequence
  Description of Artificial Sequence: Synthetic polypeptide
  XENP024236 1C11_H3.105_L3_scFv
QIQLVQSGSELKKPGASVKVSCTASGYTFTHYGMNWVRQAPGQGLEWMGWINTYTGEPTYADGFTGRFVFSLDTSVSTAYLQISSLKAEDTAVYFCARDYYGSSPYWGQGTLVTVSSGKPGSGKPGSGKPGSGKPGSDVLMTQSPDSLAVSLGERATINCKSSQSIVHSNGNTYLEWYQQKPGQSPKLLIYKVSNRFSGVPDRFSGSGSGTDFTLTISSLQAEDVAVYYCFQGSHVPNTFGGGTKVEIKGS

SEQ ID NO: 34505 - protein, 117 aa, Artificial Sequence
  Description of Artificial Sequence: Synthetic polypeptide
  VH of XENP024236
QIQLVQSGSELKKPGASVKVSCTASGYTFTHYGMNWVRQAPGQGLEWMGWINTYTGEPTYADGFTGRFVFSLDTSVSTAYLQISSLKAEDTAVYFCARDYYGSSPYWGQGTLVTVSS

SEQ ID NO: 34506 - protein, 114 aa, Artificial Sequence; identical to SEQ ID NO: 33651
  Description of Artificial Sequence: Synthetic polypeptide
  VL of XENP024236

SEQ ID NO: 34507 - protein, 5 aa, Artificial Sequence
  Description of Artificial Sequence: Synthetic peptide
  XENP024236 vhCDR1
HYGMN

SEQ ID NO: 34508 - protein, 17 aa, Artificial Sequence
  Description of Artificial Sequence: Synthetic peptide
  XENP024236 vhCDR2
WINTYTGEPTYADGFTG

SEQ ID NO: 34509 - protein, 8 aa, Artificial Sequence
  Description of Artificial Sequence: Synthetic peptide
  XENP024236 vhCDR3
DYYGSSPY

SEQ ID NO: 34510 - protein, 16 aa, Artificial Sequence
  Description of Artificial Sequence: Synthetic peptide
  XENP024236 vlCDR1
KSSQSIVHSNGNTYLE

SEQ ID NO: 34511 - protein, 7 aa, Artificial Sequence
  Description of Artificial Sequence: Synthetic peptide
  XENP024236 vlCDR2
KVSNRFS

SEQ ID NO: 34512 - protein, 9 aa, Artificial Sequence
  Description of Artificial Sequence: Synthetic peptide
  XENP024236 vlCDR3
FQGSHVPNT

SEQ ID NO: 34513 - protein, 251 aa, Artificial Sequence
  Description of Artificial Sequence: Synthetic polypeptide
  XENP024237 1C11_H3.106_L3_scFv
QIQLVQSGSELKKPGASVKVSCKVSGYTFTHYGMNWVRQAPGQGLEWMGWINTYTGEPTYADGFTGRFVFSLDTSVSTAYLQISSLKAEDTAVYFCARDYYGSSPYWGQGTLVTVSSGKPGSGKPGSGKPGSGKPGSDVLMTQSPDSLAVSLGERATINCKSSQSIVHSNGNTYLEWYQQKPGQSPKLLIYKVSNRFSGVPDRFSGSGSGTDFTLTISSLQAEDVAVYYCFQGSHVPNTFGGGTKVEIKGS

SEQ ID NO: 34514 - protein, 117 aa, Artificial Sequence
  Description of Artificial Sequence: Synthetic polypeptide
  VH of XENP024237
QIQLVQSGSELKKPGASVKVSCKVSGYTFTHYGMNWVRQAPGQGLEWMGWINTYTGEPTYADGFTGRFVFSLDTSVSTAYLQISSLKAEDTAVYFCARDYYGSSPYWGQGTLVTVSS

SEQ ID NO: 34515 - protein, 114 aa, Artificial Sequence; identical to SEQ ID NO: 33651
  Description of Artificial Sequence: Synthetic polypeptide
  VL of XENP024237

SEQ ID NO: 34516 - protein, 5 aa, Artificial Sequence
  Description of Artificial Sequence: Synthetic peptide
  XENP024237 vhCDR1
HYGMN

SEQ ID NO: 34517 - protein, 17 aa, Artificial Sequence
  Description of Artificial Sequence: Synthetic peptide
  XENP024237 vhCDR2
WINTYTGEPTYADGFTG

SEQ ID NO: 34518 - protein, 8 aa, Artificial Sequence
  Description of Artificial Sequence: Synthetic peptide
  XENP024237 vhCDR3
DYYGSSPY

SEQ ID NO: 34519 - protein, 16 aa, Artificial Sequence
  Description of Artificial Sequence: Synthetic peptide
  XENP024237 vlCDR1
KSSQSIVHSNGNTYLE

SEQ ID NO: 34520 - protein, 7 aa, Artificial Sequence
  Description of Artificial Sequence: Synthetic peptide
  XENP024237 vlCDR2
KVSNRFS

SEQ ID NO: 34521 - protein, 9 aa, Artificial Sequence
  Description of Artificial Sequence: Synthetic peptide
  XENP024237 vlCDR3
FQGSHVPNT

SEQ ID NO: 34522 - protein, 251 aa, Artificial Sequence
  Description of Artificial Sequence: Synthetic polypeptide
  XENP024238 1C11_H3.107_L3_scFv
QIQLVQSGSELKKPGASVKVSCKGSGYTFTHYGMNWVRQAPGQGLEWMGWINTYTGEPTYADGFTGRFVFSLDTSVSTAYLQISSLKAEDTAVYFCARDYYGSSPYWGQGTLVTVSSGKPGSGKPGSGKPGSGKPGSDVLMTQSPDSLAVSLGERATINCKSSQSIVHSNGNTYLEWYQQKPGQSPKLLIYKVSNRFSGVPDRFSGSGSGTDFTLTISSLQAEDVAVYYCFQGSHVPNTFGGGTKVEIKGS

SEQ ID NO: 34523 - protein, 117 aa, Artificial Sequence
  Description of Artificial Sequence: Synthetic polypeptide
  VH of XENP024238
QIQLVQSGSELKKPGASVKVSCKGSGYTFTHYGMNWVRQAPGQGLEWMGWINTYTGEPTYADGFTGRFVFSLDTSVSTAYLQISSLKAEDTAVYFCARDYYGSSPYWGQGTLVTVSS

SEQ ID NO: 34524 - protein, 114 aa, Artificial Sequence; identical to SEQ ID NO: 33651
  Description of Artificial Sequence: Synthetic polypeptide
  VL of XENP024238

SEQ ID NO: 34525 - protein, 5 aa, Artificial Sequence
  Description of Artificial Sequence: Synthetic peptide
  XENP024238 vhCDR1
HYGMN

SEQ ID NO: 34526 - protein, 17 aa, Artificial Sequence
  Description of Artificial Sequence: Synthetic peptide
  XENP024238 vhCDR2
WINTYTGEPTYADGFTG

SEQ ID NO: 34527 - protein, 8 aa, Artificial Sequence
  Description of Artificial Sequence: Synthetic peptide
  XENP024238 vhCDR3
DYYGSSPY

SEQ ID NO: 34528 - protein, 16 aa, Artificial Sequence
  Description of Artificial Sequence: Synthetic peptide
  XENP024238 vlCDR1
KSSQSIVHSNGNTYLE

SEQ ID NO: 34529 - protein, 7 aa, Artificial Sequence
  Description of Artificial Sequence: Synthetic peptide
  XENP024238 vlCDR2
KVSNRFS

SEQ ID NO: 34530 - protein, 9 aa, Artificial Sequence
  Description of Artificial Sequence: Synthetic peptide
  XENP024238 vlCDR3
FQGSHVPNT

SEQ ID NO: 34531 - protein, 251 aa, Artificial Sequence
  Description of Artificial Sequence: Synthetic polypeptide
  XENP024239 1C11_H3.109_L3_scFv
QIQLVQSGSELKKPGASVKVSCKASGFTFTHYGMNWVRQAPGQGLEWMGWINTYTGEPTYADGFTGRFVFSLDTSVSTAYLQISSLKAEDTAVYFCARDYYGSSPYWGQGTLVTVSSGKPGSGKPGSGKPGSGKPGSDVLMTQSPDSLAVSLGERATINCKSSQSIVHSNGNTYLEWYQQKPGQSPKLLIYKVSNRFSGVPDRFSGSGSGTDFTLTISSLQAEDVAVYYCFQGSHVPNTFGGGTKVEIKGS

SEQ ID NO: 34532 - protein, 117 aa, Artificial Sequence
  Description of Artificial Sequence: Synthetic polypeptide
  VH of XENP024239
QIQLVQSGSELKKPGASVKVSCKASGFTFTHYGMNWVRQAPGQGLEWMGWINTYTGEPTYADGFTGRFVFSLDTSVSTAYLQISSLKAEDTAVYFCARDYYGSSPYWGQGTLVTVSS

SEQ ID NO: 34533 - protein, 114 aa, Artificial Sequence; identical to SEQ ID NO: 33651
  Description of Artificial Sequence: Synthetic polypeptide
  VL of XENP024239

SEQ ID NO: 34534 - protein, 5 aa, Artificial Sequence
  Description of Artificial Sequence: Synthetic peptide
  XENP024239 vhCDR1
HYGMN

SEQ ID NO: 34535 - protein, 17 aa, Artificial Sequence
  Description of Artificial Sequence: Synthetic peptide
  XENP024239 vhCDR2
WINTYTGEPTYADGFTG

SEQ ID NO: 34536 - protein, 8 aa, Artificial Sequence
  Description of Artificial Sequence: Synthetic peptide
  XENP024239 vhCDR3
DYYGSSPY

SEQ ID NO: 34537 - protein, 16 aa, Artificial Sequence
  Description of Artificial Sequence: Synthetic peptide
  XENP024239 vlCDR1
KSSQSIVHSNGNTYLE

SEQ ID NO: 34538 - protein, 7 aa, Artificial Sequence
  Description of Artificial Sequence: Synthetic peptide
  XENP024239 vlCDR2
KVSNRFS

SEQ ID NO: 34539 - protein, 9 aa, Artificial Sequence
  Description of Artificial Sequence: Synthetic peptide
  XENP024239 vlCDR3
FQGSHVPNT

SEQ ID NO: 34540 - protein, 251 aa, Artificial Sequence
  Description of Artificial Sequence: Synthetic polypeptide
  XENP024240 1C11_H3.110_L3_scFv
QIQLVQSGSELKKPGASVKVSCKASGGTFTHYGMNWVRQAPGQGLEWMGWINTYTGEPTYADGFTGRFVFSLDTSVSTAYLQISSLKAEDTAVYFCARDYYGSSPYWGQGTLVTVSSGKPGSGKPGSGKPGSGKPGSDVLMTQSPDSLAVSLGERATINCKSSQSIVHSNGNTYLEWYQQKPGQSPKLLIYKVSNRFSGVPDRFSGSGSGTDFTLTISSLQAEDVAVYYCFQGSHVPNTFGGGTKVEIKGS

SEQ ID NO: 34541 - protein, 117 aa, Artificial Sequence
  Description of Artificial Sequence: Synthetic polypeptide
  VH of XENP024240
QIQLVQSGSELKKPGASVKVSCKASGGTFTHYGMNWVRQAPGQGLEWMGWINTYTGEPTYADGFTGRFVFSLDTSVSTAYLQISSLKAEDTAVYFCARDYYGSSPYWGQGTLVTVSS

SEQ ID NO: 34542 - protein, 114 aa, Artificial Sequence; identical to SEQ ID NO: 33651
  Description of Artificial Sequence: Synthetic polypeptide
  VL of XENP024240

SEQ ID NO: 34543 - protein, 5 aa, Artificial Sequence
  Description of Artificial Sequence: Synthetic peptide
  XENP024240 vhCDR1
HYGMN

SEQ ID NO: 34544 - protein, 17 aa, Artificial Sequence
  Description of Artificial Sequence: Synthetic peptide
  XENP024240 vhCDR2
WINTYTGEPTYADGFTG

SEQ ID NO: 34545 - protein, 8 aa, Artificial Sequence
  Description of Artificial Sequence: Synthetic peptide
  XENP024240 vhCDR3
DYYGSSPY

SEQ ID NO: 34546 - protein, 16 aa, Artificial Sequence
  Description of Artificial Sequence: Synthetic peptide
  XENP024240 vlCDR1
KSSQSIVHSNGNTYLE

SEQ ID NO: 34547 - protein, 7 aa, Artificial Sequence
  Description of Artificial Sequence: Synthetic peptide
  XENP024240 vlCDR2
KVSNRFS

SEQ ID NO: 34548 - protein, 9 aa, Artificial Sequence
  Description of Artificial Sequence: Synthetic peptide
  XENP024240 vlCDR3
FQGSHVPNT

SEQ ID NO: 34549 - protein, 251 aa, Artificial Sequence
  Description of Artificial Sequence: Synthetic polypeptide
  XENP024241 1C11_H3.111_L3_scFv
QIQLVQSGSELKKPGASVKVSCKASGYSFTHYGMNWVRQAPGQGLEWMGWINTYTGEPTYADGFTGRFVFSLDTSVSTAYLQISSLKAEDTAVYFCARDYYGSSPYWGQGTLVTVSSGKPGSGKPGSGKPGSGKPGSDVLMTQSPDSLAVSLGERATINCKSSQSIVHSNGNTYLEWYQQKPGQSPKLLIYKVSNRFSGVPDRFSGSGSGTDFTLTISSLQAEDVAVYYCFQGSHVPNTFGGGTKVEIKGS

SEQ ID NO: 34550 - protein, 117 aa, Artificial Sequence
  Description of Artificial Sequence: Synthetic polypeptide
  VH of XENP024241
QIQLVQSGSELKKPGASVKVSCKASGYSFTHYGMNWVRQAPGQGLEWMGWINTYTGEPTYADGFTGRFVFSLDTSVSTAYLQISSLKAEDTAVYFCARDYYGSSPYWGQGTLVTVSS

SEQ ID NO: 34551 - protein, 114 aa, Artificial Sequence; identical to SEQ ID NO: 33651
  Description of Artificial Sequence: Synthetic polypeptide
  VL of XENP024241

SEQ ID NO: 34552 - protein, 5 aa, Artificial Sequence
  Description of Artificial Sequence: Synthetic peptide
  XENP024241 vhCDR1
HYGMN

SEQ ID NO: 34553 - protein, 17 aa, Artificial Sequence
  Description of Artificial Sequence: Synthetic peptide
  XENP024241 vhCDR2
WINTYTGEPTYADGFTG

SEQ ID NO: 34554 - protein, 8 aa, Artificial Sequence
  Description of Artificial Sequence: Synthetic peptide
  XENP024241 vhCDR3
DYYGSSPY

SEQ ID NO: 34555 - protein, 16 aa, Artificial Sequence
  Description of Artificial Sequence: Synthetic peptide
  XENP024241 vlCDR1
KSSQSIVHSNGNTYLE

SEQ ID NO: 34556 - protein, 7 aa, Artificial Sequence
  Description of Artificial Sequence: Synthetic peptide
  XENP024241 vlCDR2
KVSNRFS

SEQ ID NO: 34557 - protein, 9 aa, Artificial Sequence
  Description of Artificial Sequence: Synthetic peptide
  XENP024241 vlCDR3
FQGSHVPNT

SEQ ID NO: 34558 - protein, 251 aa, Artificial Sequence
  Description of Artificial Sequence: Synthetic polypeptide
  XENP024242 1C11_H3.113_L3_scFv
QIQLVQSGSELKKPGASVKVSCKASGYTITHYGMNWVRQAPGQGLEWMGWINTYTGEPTYADGFTGRFVFSLDTSVSTAYLQISSLKAEDTAVYFCARDYYGSSPYWGQGTLVTVSSGKPGSGKPGSGKPGSGKPGSDVLMTQSPDSLAVSLGERATINCKSSQSIVHSNGNTYLEWYQQKPGQSPKLLIYKVSNRFSGVPDRFSGSGSGTDFTLTISSLQAEDVAVYYCFQGSHVPNTFGGGTKVEIKGS

SEQ ID NO: 34559 - protein, 117 aa, Artificial Sequence
  Description of Artificial Sequence: Synthetic polypeptide
  VH of XENP024242
QIQLVQSGSELKKPGASVKVSCKASGYTITHYGMNWVRQAPGQGLEWMGWINTYTGEPTYADGFTGRFVFSLDTSVSTAYLQISSLKAEDTAVYFCARDYYGSSPYWGQGTLVTVSS

SEQ ID NO: 34560 - protein, 114 aa, Artificial Sequence; identical to SEQ ID NO: 33651
  Description of Artificial Sequence: Synthetic polypeptide
  VL of XENP024242

SEQ ID NO: 34561 - protein, 5 aa, Artificial Sequence
  Description of Artificial Sequence: Synthetic peptide
  XENP024242 vhCDR1
HYGMN

SEQ ID NO: 34562 - protein, 17 aa, Artificial Sequence
  Description of Artificial Sequence: Synthetic peptide
  XENP024242 vhCDR2
WINTYTGEPTYADGFTG

SEQ ID NO: 34563 - protein, 8 aa, Artificial Sequence
  Description of Artificial Sequence: Synthetic peptide
  XENP024242 vhCDR3
DYYGSSPY

SEQ ID NO: 34564 - protein, 16 aa, Artificial Sequence
  Description of Artificial Sequence: Synthetic peptide
  XENP024242 vlCDR1
KSSQSIVHSNGNTYLE

SEQ ID NO: 34565 - protein, 7 aa, Artificial Sequence
  Description of Artificial Sequence: Synthetic peptide
  XENP024242 vlCDR2
KVSNRFS

SEQ ID NO: 34566 - protein, 9 aa, Artificial Sequence
  Description of Artificial Sequence: Synthetic peptide
  XENP024242 vlCDR3
FQGSHVPNT

SEQ ID NO: 34567 - protein, 251 aa, Artificial Sequence
  Description of Artificial Sequence: Synthetic polypeptide
  XENP024243 1C11_H3.114_L3_scFv
QIQLVQSGSELKKPGASVKVSCKASGYTVTHYGMNWVRQAPGQGLEWMGWINTYTGEPTYADGFTGRFVFSLDTSVSTAYLQISSLKAEDTAVYFCARDYYGSSPYWGQGTLVTVSSGKPGSGKPGSGKPGSGKPGSDVLMTQSPDSLAVSLGERATINCKSSQSIVHSNGNTYLEWYQQKPGQSPKLLIYKVSNRFSGVPDRFSGSGSGTDFTLTISSLQAEDVAVYYCFQGSHVPNTFGGGTKVEIKGS

SEQ ID NO: 34568 - protein, 117 aa, Artificial Sequence
  Description of Artificial Sequence: Synthetic polypeptide
  VH of XENP024243
QIQLVQSGSELKKPGASVKVSCKASGYTVTHYGMNWVRQAPGQGLEWMGWINTYTGEPTYADGFTGRFVFSLDTSVSTAYLQISSLKAEDTAVYFCARDYYGSSPYWGQGTLVTVSS

SEQ ID NO: 34569 - protein, 114 aa, Artificial Sequence; identical to SEQ ID NO: 33651
  Description of Artificial Sequence: Synthetic polypeptide
  VL of XENP024243

SEQ ID NO: 34570 - protein, 5 aa, Artificial Sequence
  Description of Artificial Sequence: Synthetic peptide
  XENP024243 vhCDR1
HYGMN

SEQ ID NO: 34571 - protein, 17 aa, Artificial Sequence
  Description of Artificial Sequence: Synthetic peptide
  XENP024243 vhCDR2
WINTYTGEPTYADGFTG

SEQ ID NO: 34572 - protein, 8 aa, Artificial Sequence
  Description of Artificial Sequence: Synthetic peptide
  XENP024243 vhCDR3
DYYGSSPY

SEQ ID NO: 34573 - protein, 16 aa, Artificial Sequence
  Description of Artificial Sequence: Synthetic peptide
  XENP024243 vlCDR1
KSSQSIVHSNGNTYLE

SEQ ID NO: 34574 - protein, 7 aa, Artificial Sequence
  Description of Artificial Sequence: Synthetic peptide
  XENP024243 vlCDR2
KVSNRFS

SEQ ID NO: 34575 - protein, 9 aa, Artificial Sequence
  Description of Artificial Sequence: Synthetic peptide
  XENP024243 vlCDR3
FQGSHVPNT

SEQ ID NO: 34576 - protein, 251 aa, Artificial Sequence
  Description of Artificial Sequence: Synthetic polypeptide
  XENP024244 1C11_H3.115_L3_scFv
QIQLVQSGSELKKPGASVKVSCKASGYTFSHYGMNWVRQAPGQGLEWMGWINTYTGEPTYADGFTGRFVFSLDTSVSTAYLQISSLKAEDTAVYFCARDYYGSSPYWGQGTLVTVSSGKPGSGKPGSGKPGSGKPGSDVLMTQSPDSLAVSLGERATINCKSSQSIVHSNGNTYLEWYQQKPGQSPKLLIYKVSNRFSGVPDRFSGSGSGTDFTLTISSLQAEDVAVYYCFQGSHVPNTFGGGTKVEIKGS

SEQ ID NO: 34577 - protein, 117 aa, Artificial Sequence
  Description of Artificial Sequence: Synthetic polypeptide
  VH of XENP024244
QIQLVQSGSELKKPGASVKVSCKASGYTFSHYGMNWVRQAPGQGLEWMGWINTYTGEPTYADGFTGRFVFSLDTSVSTAYLQISSLKAEDTAVYFCARDYYGSSPYWGQGTLVTVSS

SEQ ID NO: 34578 - protein, 114 aa, Artificial Sequence; identical to SEQ ID NO: 33651
  Description of Artificial Sequence: Synthetic polypeptide
  VL of XENP024244

SEQ ID NO: 34579 - protein, 5 aa, Artificial Sequence
  Description of Artificial Sequence: Synthetic peptide
  XENP024244 vhCDR1
HYGMN

SEQ ID NO: 34580 - protein, 17 aa, Artificial Sequence
  Description of Artificial Sequence: Synthetic peptide
  XENP024244 vhCDR2
WINTYTGEPTYADGFTG

SEQ ID NO: 34581 - protein, 8 aa, Artificial Sequence
  Description of Artificial Sequence: Synthetic peptide
  XENP024244 vhCDR3
DYYGSSPY

SEQ ID NO: 34582 - protein, 16 aa, Artificial Sequence
  Description of Artificial Sequence: Synthetic peptide
  XENP024244 vlCDR1
KSSQSIVHSNGNTYLE

SEQ ID NO: 34583 - protein, 7 aa, Artificial Sequence
  Description of Artificial Sequence: Synthetic peptide
  XENP024244 vlCDR2
KVSNRFS

SEQ ID NO: 34584 - protein, 9 aa, Artificial Sequence
  Description of Artificial Sequence: Synthetic peptide
  XENP024244 vlCDR3
FQGSHVPNT

SEQ ID NO: 34585 - protein, 251 aa, Artificial Sequence
  Description of Artificial Sequence: Synthetic polypeptide
  XENP024245 1C11_H3.116_L3_scFv
QIQLVQSGSELKKPGASVKVSCKASGYTFDHYGMNWVRQAPGQGLEWMGWINTYTGEPTYADGFTGRFVFSLDTSVSTAYLQISSLKAEDTAVYFCARDYYGSSPYWGQGTLVTVSSGKPGSGKPGSGKPGSGKPGSDVLMTQSPDSLAVSLGERATINCKSSQSIVHSNGNTYLEWYQQKPGQSPKLLIYKVSNRFSGVPDRFSGSGSGTDFTLTISSLQAEDVAVYYCFQGSHVPNTFGGGTKVEIKGS

SEQ ID NO: 34586 - protein, 117 aa, Artificial Sequence
  Description of Artificial Sequence: Synthetic polypeptide
  VH of XENP024245
QIQLVQSGSELKKPGASVKVSCKASGYTFDHYGMNWVRQAPGQGLEWMGWINTYTGEPTYADGFTGRFVFSLDTSVSTAYLQISSLKAEDTAVYFCARDYYGSSPYWGQGTLVTVSS

SEQ ID NO: 34587 - protein, 114 aa, Artificial Sequence; identical to SEQ ID NO: 33651
  Description of Artificial Sequence: Synthetic polypeptide
  VL of XENP024245

SEQ ID NO: 34588 - protein, 5 aa, Artificial Sequence
  Description of Artificial Sequence: Synthetic peptide
  XENP024245 vhCDR1
HYGMN

SEQ ID NO: 34589 - protein, 17 aa, Artificial Sequence
  Description of Artificial Sequence: Synthetic peptide
  XENP024245 vhCDR2
WINTYTGEPTYADGFTG

SEQ ID NO: 34590 - protein, 8 aa, Artificial Sequence
  Description of Artificial Sequence: Synthetic peptide
  XENP024245 vhCDR3
DYYGSSPY

SEQ ID NO: 34591 - protein, 16 aa, Artificial Sequence
  Description of Artificial Sequence: Synthetic peptide
  XENP024245 vlCDR1
KSSQSIVHSNGNTYLE

SEQ ID NO: 34592 - protein, 7 aa, Artificial Sequence
  Description of Artificial Sequence: Synthetic peptide
  XENP024245 vlCDR2
KVSNRFS

SEQ ID NO: 34593 - protein, 9 aa, Artificial Sequence
  Description of Artificial Sequence: Synthetic peptide
  XENP024245 vlCDR3
FQGSHVPNT

SEQ ID NO: 34594 - protein, 251 aa, Artificial Sequence
  Description of Artificial Sequence: Synthetic polypeptide
  XENP024246 1C11_H3.117_L3_scFv
QIQLVQSGSELKKPGASVKVSCKASGYTFGHYGMNWVRQAPGQGLEWMGWINTYTGEPTYADGFTGRFVFSLDTSVSTAYLQISSLKAEDTAVYFCARDYYGSSPYWGQGTLVTVSSGKPGSGKPGSGKPGSGKPGSDVLMTQSPDSLAVSLGERATINCKSSQSIVHSNGNTYLEWYQQKPGQSPKLLIYKVSNRFSGVPDRFSGSGSGTDFTLTISSLQAEDVAVYYCFQGSHVPNTFGGGTKVEIKGS

SEQ ID NO: 34595 - protein, 117 aa, Artificial Sequence
  Description of Artificial Sequence: Synthetic polypeptide
  VH of XENP024246
QIQLVQSGSELKKPGASVKVSCKASGYTFGHYGMNWVRQAPGQGLEWMGWINTYTGEPTYADGFTGRFVFSLDTSVSTAYLQISSLKAEDTAVYFCARDYYGSSPYWGQGTLVTVSS

SEQ ID NO: 34596 - protein, 114 aa, Artificial Sequence; identical to SEQ ID NO: 33651
  Description of Artificial Sequence: Synthetic polypeptide
  VL of XENP024246

SEQ ID NO: 34597 - protein, 5 aa, Artificial Sequence
  Description of Artificial Sequence: Synthetic peptide
  XENP024246 vhCDR1
HYGMN

SEQ ID NO: 34598 - protein, 17 aa, Artificial Sequence
  Description of Artificial Sequence: Synthetic peptide
  XENP024246 vhCDR2
WINTYTGEPTYADGFTG

SEQ ID NO: 34599 - protein, 8 aa, Artificial Sequence
  Description of Artificial Sequence: Synthetic peptide
  XENP024246 vhCDR3
DYYGSSPY

SEQ ID NO: 34600 - protein, 16 aa, Artificial Sequence
  Description of Artificial Sequence: Synthetic peptide
  XENP024246 vlCDR1
KSSQSIVHSNGNTYLE

SEQ ID NO: 34601 - protein, 7 aa, Artificial Sequence
  Description of Artificial Sequence: Synthetic peptide
  XENP024246 vlCDR2
KVSNRFS

SEQ ID NO: 34602 - protein, 9 aa, Artificial Sequence
  Description of Artificial Sequence: Synthetic peptide
  XENP024246 vlCDR3
FQGSHVPNT

SEQ ID NO: 34603 - protein, 251 aa, Artificial Sequence
  Description of Artificial Sequence: Synthetic polypeptide
  XENP024247 1C11_H3.120_L3_scFv
QIQLVQSGSELKKPGASVKVSCKASGYTFTHYGINWVRQAPGQGLEWMGWINTYTGEPTYADGFTGRFVFSLDTSVSTAYLQISSLKAEDTAVYFCARDYYGSSPYWGQGTLVTVSSGKPGSGKPGSGKPGSGKPGSDVLMTQSPDSLAVSLGERATINCKSSQSIVHSNGNTYLEWYQQKPGQSPKLLIYKVSNRFSGVPDRFSGSGSGTDFTLTISSLQAEDVAVYYCFQGSHVPNTFGGGTKVEIKGS

SEQ ID NO: 34604 - protein, 117 aa, Artificial Sequence
  Description of Artificial Sequence: Synthetic polypeptide
  VH of XENP024247
QIQLVQSGSELKKPGASVKVSCKASGYTFTHYGINWVRQAPGQGLEWMGWINTYTGEPTYADGFTGRFVFSLDTSVSTAYLQISSLKAEDTAVYFCARDYYGSSPYWGQGTLVTVSS

SEQ ID NO: 34605 - protein, 114 aa, Artificial Sequence; identical to SEQ ID NO: 33651
  Description of Artificial Sequence: Synthetic polypeptide
  VL of XENP024247

SEQ ID NO: 34606 - protein, 5 aa, Artificial Sequence
  Description of Artificial Sequence: Synthetic peptide
  XENP024247 vhCDR1
HYGIN

SEQ ID NO: 34607 - protein, 17 aa, Artificial Sequence
  Description of Artificial Sequence: Synthetic peptide
  XENP024247 vhCDR2
WINTYTGEPTYADGFTG

SEQ ID NO: 34608 - protein, 8 aa, Artificial Sequence
  Description of Artificial Sequence: Synthetic peptide
  XENP024247 vhCDR3
DYYGSSPY

SEQ ID NO: 34609 - protein, 16 aa, Artificial Sequence
  Description of Artificial Sequence: Synthetic peptide
  XENP024247 vlCDR1
KSSQSIVHSNGNTYLE

SEQ ID NO: 34610 - protein, 7 aa, Artificial Sequence
  Description of Artificial Sequence: Synthetic peptide
  XENP024247 vlCDR2
KVSNRFS

SEQ ID NO: 34611 - protein, 9 aa, Artificial Sequence
  Description of Artificial Sequence: Synthetic peptide
  XENP024247 vlCDR3
FQGSHVPNT

SEQ ID NO: 34612 - protein, 251 aa, Artificial Sequence
  Description of Artificial Sequence: Synthetic polypeptide
  XENP024248 1C11_H3.121_L3_scFv
QIQLVQSGSELKKPGASVKVSCKASGYTFTHYGVNWVRQAPGQGLEWMGWINTYTGEPTYADGFTGRFVFSLDTSVSTAYLQISSLKAEDTAVYFCARDYYGSSPYWGQGTLVTVSSGKPGSGKPGSGKPGSGKPGSDVLMTQSPDSLAVSLGERATINCKSSQSIVHSNGNTYLEWYQQKPGQSPKLLIYKVSNRFSGVPDRFSGSGSGTDFTLTISSLQAEDVAVYYCFQGSHVPNTFGGGTKVEIKGS

SEQ ID NO: 34613 - protein, 117 aa, Artificial Sequence
  Description of Artificial Sequence: Synthetic polypeptide
  VH of XENP024248
QIQLVQSGSELKKPGASVKVSCKASGYTFTHYGVNWVRQAPGQGLEWMGWINTYTGEPTYADGFTGRFVFSLDTSVSTAYLQISSLKAEDTAVYFCARDYYGSSPYWGQGTLVTVSS

SEQ ID NO: 34614 - protein, 114 aa, Artificial Sequence; identical to SEQ ID NO: 33651
  Description of Artificial Sequence: Synthetic polypeptide
  VL of XENP024248

SEQ ID NO: 34615 - protein, 5 aa, Artificial Sequence
  Description of Artificial Sequence: Synthetic peptide
  XENP024248 vhCDR1
HYGVN

SEQ ID NO: 34616 - protein, 17 aa, Artificial Sequence
  Description of Artificial Sequence: Synthetic peptide
  XENP024248 vhCDR2
WINTYTGEPTYADGFTG

SEQ ID NO: 34617 - protein, 8 aa, Artificial Sequence
  Description of Artificial Sequence: Synthetic peptide
  XENP024248 vhCDR3
DYYGSSPY

SEQ ID NO: 34618 - protein, 16 aa, Artificial Sequence
  Description of Artificial Sequence: Synthetic peptide
  XENP024248 vlCDR1
KSSQSIVHSNGNTYLE

SEQ ID NO: 34619 - protein, 7 aa, Artificial Sequence
  Description of Artificial Sequence: Synthetic peptide
  XENP024248 vlCDR2
KVSNRFS

SEQ ID NO: 34620 - protein, 9 aa, Artificial Sequence
  Description of Artificial Sequence: Synthetic peptide
  XENP024248 vlCDR3
FQGSHVPNT

SEQ ID NO: 34621 - protein, 251 aa, Artificial Sequence
  Description of Artificial Sequence: Synthetic polypeptide
  XENP024249 1C11_H3.123_L3_scFv
QIQLVQSGSELKKPGASVKVSCKASGYTFTHYGMNWIRQAPGQGLEWMGWINTYTGEPTYADGFTGRFVFSLDTSVSTAYLQISSLKAEDTAVYFCARDYYGSSPYWGQGTLVTVSSGKPGSGKPGSGKPGSGKPGSDVLMTQSPDSLAVSLGERATINCKSSQSIVHSNGNTYLEWYQQKPGQSPKLLIYKVSNRFSGVPDRFSGSGSGTDFTLTISSLQAEDVAVYYCFQGSHVPNTFGGGTKVEIKGS

SEQ ID NO: 34622 - protein, 117 aa, Artificial Sequence
  Description of Artificial Sequence: Synthetic polypeptide
  VH of XENP024249
QIQLVQSGSELKKPGASVKVSCKASGYTFTHYGMNWIRQAPGQGLEWMGWINTYTGEPTYADGFTGRFVFSLDTSVSTAYLQISSLKAEDTAVYFCARDYYGSSPYWGQGTLVTVSS

SEQ ID NO: 34623 - protein, 114 aa, Artificial Sequence; identical to SEQ ID NO: 33651
  Description of Artificial Sequence: Synthetic polypeptide
  VL of XENP024249

SEQ ID NO: 34624 - protein, 5 aa, Artificial Sequence
  Description of Artificial Sequence: Synthetic peptide
  XENP024249 vhCDR1
HYGMN

SEQ ID NO: 34625 - protein, 17 aa, Artificial Sequence
  Description of Artificial Sequence: Synthetic peptide
  XENP024249 vhCDR2
WINTYTGEPTYADGFTG

SEQ ID NO: 34626 - protein, 8 aa, Artificial Sequence
  Description of Artificial Sequence: Synthetic peptide
  XENP024249 vhCDR3
DYYGSSPY

SEQ ID NO: 34627 - protein, 16 aa, Artificial Sequence
  Description of Artificial Sequence: Synthetic peptide
  XENP024249 vlCDR1
KSSQSIVHSNGNTYLE

SEQ ID NO: 34628 - protein, 7 aa, Artificial Sequence
  Description of Artificial Sequence: Synthetic peptide
  XENP024249 vlCDR2
KVSNRFS

SEQ ID NO: 34629 - protein, 9 aa, Artificial Sequence
  Description of Artificial Sequence: Synthetic peptide
  XENP024249 vlCDR3
FQGSHVPNT

SEQ ID NO: 34630 - protein, 251 aa, Artificial Sequence
  Description of Artificial Sequence: Synthetic polypeptide
  XENP024250 1C11_H3.125_L3_scFv
QIQLVQSGSELKKPGASVKVSCKASGYTFTHYGMNWVRQPPGQGLEWMGWINTYTGEPTYADGFTGRFVFSLDTSVSTAYLQISSLKAEDTAVYFCARDYYGSSPYWGQGTLVTVSSGKPGSGKPGSGKPGSGKPGSDVLMTQSPDSLAVSLGERATINCKSSQSIVHSNGNTYLEWYQQKPGQSPKLLIYKVSNRFSGVPDRFSGSGSGTDFTLTISSLQAEDVAVYYCFQGSHVPNTFGGGTKVEIKGS

SEQ ID NO: 34631 - protein, 117 aa, Artificial Sequence
  Description of Artificial Sequence: Synthetic polypeptide
  VH of XENP024250
QIQLVQSGSELKKPGASVKVSCKASGYTFTHYGMNWVRQPPGQGLEWMGWINTYTGEPTYADGFTGRFVFSLDTSVSTAYLQISSLKAEDTAVYFCARDYYGSSPYWGQGTLVTVSS

SEQ ID NO: 34632 - protein, 114 aa, Artificial Sequence; identical to SEQ ID NO: 33651
  Description of Artificial Sequence: Synthetic polypeptide
  VL of XENP024250

SEQ ID NO: 34633 - protein, 5 aa, Artificial Sequence
  Description of Artificial Sequence: Synthetic peptide
  XENP024250 vhCDR1
HYGMN

SEQ ID NO: 34634 - protein, 17 aa, Artificial Sequence
  Description of Artificial Sequence: Synthetic peptide
  XENP024250 vhCDR2
WINTYTGEPTYADGFTG

SEQ ID NO: 34635 - protein, 8 aa, Artificial Sequence
  Description of Artificial Sequence: Synthetic peptide
  XENP024250 vhCDR3
DYYGSSPY

SEQ ID NO: 34636 - protein, 16 aa, Artificial Sequence
  Description of Artificial Sequence: Synthetic peptide
  XENP024250 vlCDR1
KSSQSIVHSNGNTYLE

SEQ ID NO: 34637 - protein, 7 aa, Artificial Sequence
  Description of Artificial Sequence: Synthetic peptide
  XENP024250 vlCDR2
KVSNRFS

SEQ ID NO: 34638 - protein, 9 aa, Artificial Sequence
  Description of Artificial Sequence: Synthetic peptide
  XENP024250 vlCDR3
FQGSHVPNT

SEQ ID NO: 34639 - protein, 251 aa, Artificial Sequence
  Description of Artificial Sequence: Synthetic polypeptide
  XENP024251 1C11_H3.126_L3_scFv
QIQLVQSGSELKKPGASVKVSCKASGYTFTHYGMNWVRQATGQGLEWMGWINTYTGEPTYADGFTGRFVFSLDTSVSTAYLQISSLKAEDTAVYFCARDYYGSSPYWGQGTLVTVSSGKPGSGKPGSGKPGSGKPGSDVLMTQSPDSLAVSLGERATINCKSSQSIVHSNGNTYLEWYQQKPGQSPKLLIYKVSNRFSGVPDRFSGSGSGTDFTLTISSLQAEDVAVYYCFQGSHVPNTFGGGTKVEIKGS

SEQ ID NO: 34640 - protein, 117 aa, Artificial Sequence
  Description of Artificial Sequence: Synthetic polypeptide
  VH of XENP024251
QIQLVQSGSELKKPGASVKVSCKASGYTFTHYGMNWVRQATGQGLEWMGWINTYTGEPTYADGFTGRFVFSLDTSVSTAYLQISSLKAEDTAVYFCARDYYGSSPYWGQGTLVTVSS

SEQ ID NO: 34641 - protein, 114 aa, Artificial Sequence; identical to SEQ ID NO: 33651
  Description of Artificial Sequence: Synthetic polypeptide
  VL of XENP024251

SEQ ID NO: 34642 - protein, 5 aa, Artificial Sequence
  Description of Artificial Sequence: Synthetic peptide
  XENP024251 vhCDR1
HYGMN

SEQ ID NO: 34643 - protein, 17 aa, Artificial Sequence
  Description of Artificial Sequence: Synthetic peptide
  XENP024251 vhCDR2
WINTYTGEPTYADGFTG

SEQ ID NO: 34644 - protein, 8 aa, Artificial Sequence
  Description of Artificial Sequence: Synthetic peptide
  XENP024251 vhCDR3
DYYGSSPY

SEQ ID NO: 34645 - protein, 16 aa, Artificial Sequence
  Description of Artificial Sequence: Synthetic peptide
  XENP024251 vlCDR1
KSSQSIVHSNGNTYLE

SEQ ID NO: 34646 - protein, 7 aa, Artificial Sequence
  Description of Artificial Sequence: Synthetic peptide
  XENP024251 vlCDR2
KVSNRFS

SEQ ID NO: 34647 - protein, 9 aa, Artificial Sequence
  Description of Artificial Sequence: Synthetic peptide
  XENP024251 vlCDR3
FQGSHVPNT

SEQ ID NO: 34648 - protein, 251 aa, Artificial Sequence
  Description of Artificial Sequence: Synthetic polypeptide
  XENP024252 1C11_H3.127_L3_scFv
QIQLVQSGSELKKPGASVKVSCKASGYTFTHYGMNWVRQAPGQALEWMGWINTYTGEPTYADGFTGRFVFSLDTSVSTAYLQISSLKAEDTAVYFCARDYYGSSPYWGQGTLVTVSSGKPGSGKPGSGKPGSGKPGSDVLMTQSPDSLAVSLGERATINCKSSQSIVHSNGNTYLEWYQQKPGQSPKLLIYKVSNRFSGVPDRFSGSGSGTDFTLTISSLQAEDVAVYYCFQGSHVPNTFGGGTKVEIKGS

SEQ ID NO: 34649 - protein, 117 aa, Artificial Sequence
  Description of Artificial Sequence: Synthetic polypeptide
  VH of XENP024252
QIQLVQSGSELKKPGASVKVSCKASGYTFTHYGMNWVRQAPGQALEWMGWINTYTGEPTYADGFTGRFVFSLDTSVSTAYLQISSLKAEDTAVYFCARDYYGSSPYWGQGTLVTVSS

SEQ ID NO: 34650 - protein, 114 aa, Artificial Sequence; identical to SEQ ID NO: 33651
  Description of Artificial Sequence: Synthetic polypeptide
  VL of XENP024252

SEQ ID NO: 34651 - protein, 5 aa, Artificial Sequence
  Description of Artificial Sequence: Synthetic peptide
  XENP024252 vhCDR1
HYGMN

SEQ ID NO: 34652 - protein, 17 aa, Artificial Sequence
  Description of Artificial Sequence: Synthetic peptide
  XENP024252 vhCDR2
WINTYTGEPTYADGFTG

SEQ ID NO: 34653 - protein, 8 aa, Artificial Sequence
  Description of Artificial Sequence: Synthetic peptide
  XENP024252 vhCDR3
DYYGSSPY

SEQ ID NO: 34654 - protein, 16 aa, Artificial Sequence
  Description of Artificial Sequence: Synthetic peptide
  XENP024252 vlCDR1
KSSQSIVHSNGNTYLE

SEQ ID NO: 34655 - protein, 7 aa, Artificial Sequence
  Description of Artificial Sequence: Synthetic peptide
  XENP024252 vlCDR2
KVSNRFS

SEQ ID NO: 34656 - protein, 9 aa, Artificial Sequence
  Description of Artificial Sequence: Synthetic peptide
  XENP024252 vlCDR3
FQGSHVPNT

SEQ ID NO: 34657 - protein, 251 aa, Artificial Sequence
  Description of Artificial Sequence: Synthetic polypeptide
  XENP024253 1C11_H3.128_L3_scFv
QIQLVQSGSELKKPGASVKVSCKASGYTFTHYGMNWVRQAPGQGLEWVGWINTYTGEPTYADGFTGRFVFSLDTSVSTAYLQISSLKAEDTAVYFCARDYYGSSPYWGQGTLVTVSSGKPGSGKPGSGKPGSGKPGSDVLMTQSPDSLAVSLGERATINCKSSQSIVHSNGNTYLEWYQQKPGQSPKLLIYKVSNRFSGVPDRFSGSGSGTDFTLTISSLQAEDVAVYYCFQGSHVPNTFGGGTKVEIKGS

SEQ ID NO: 34658 - protein, 117 aa, Artificial Sequence
  Description of Artificial Sequence: Synthetic polypeptide
  VH of XENP024253
QIQLVQSGSELKKPGASVKVSCKASGYTFTHYGMNWVRQAPGQGLEWVGWINTYTGEPTYADGFTGRFVFSLDTSVSTAYLQISSLKAEDTAVYFCARDYYGSSPYWGQGTLVTVSS

SEQ ID NO: 34659 - protein, 114 aa, Artificial Sequence; identical to SEQ ID NO: 33651
  Description of Artificial Sequence: Synthetic polypeptide
  VL of XENP024253

SEQ ID NO: 34660 - protein, 5 aa, Artificial Sequence
  Description of Artificial Sequence: Synthetic peptide
  XENP024253 vhCDR1
HYGMN

SEQ ID NO: 34661 - protein, 17 aa, Artificial Sequence
  Description of Artificial Sequence: Synthetic peptide
  XENP024253 vhCDR2
WINTYTGEPTYADGFTG

SEQ ID NO: 34662 - protein, 8 aa, Artificial Sequence
  Description of Artificial Sequence: Synthetic peptide
  XENP024253 vhCDR3
DYYGSSPY

SEQ ID NO: 34663 - protein, 16 aa, Artificial Sequence
  Description of Artificial Sequence: Synthetic peptide
  XENP024253 vlCDR1
KSSQSIVHSNGNTYLE

SEQ ID NO: 34664 - protein, 7 aa, Artificial Sequence
  Description of Artificial Sequence: Synthetic peptide
  XENP024253 vlCDR2
KVSNRFS

SEQ ID NO: 34665 - protein, 9 aa, Artificial Sequence
  Description of Artificial Sequence: Synthetic peptide
  XENP024253 vlCDR3
FQGSHVPNT

SEQ ID NO: 34666 - protein, 251 aa, Artificial Sequence
  Description of Artificial Sequence: Synthetic polypeptide
  XENP024254 1C11_H3.129_L3_scFv
QIQLVQSGSELKKPGASVKVSCKASGYTFTHYGMNWVRQAPGQGLEWIGWINTYTGEPTYADGFTGRFVFSLDTSVSTAYLQISSLKAEDTAVYFCARDYYGSSPYWGQGTLVTVSSGKPGSGKPGSGKPGSGKPGSDVLMTQSPDSLAVSLGERATINCKSSQSIVHSNGNTYLEWYQQKPGQSPKLLIYKVSNRFSGVPDRFSGSGSGTDFTLTISSLQAEDVAVYYCFQGSHVPNTFGGGTKVEIKGS

SEQ ID NO: 34667 - protein, 117 aa, Artificial Sequence
  Description of Artificial Sequence: Synthetic polypeptide
  VH of XENP024254
QIQLVQSGSELKKPGASVKVSCKASGYTFTHYGMNWVRQAPGQGLEWIGWINTYTGEPTYADGFTGRFVFSLDTSVSTAYLQISSLKAEDTAVYFCARDYYGSSPYWGQGTLVTVSS

SEQ ID NO: 34668 - protein, 114 aa, Artificial Sequence; identical to SEQ ID NO: 33651
  Description of Artificial Sequence: Synthetic polypeptide
  VL of XENP024254

SEQ ID NO: 34669 - protein, 5 aa, Artificial Sequence
  Description of Artificial Sequence: Synthetic peptide
  XENP024254 vhCDR1
HYGMN

SEQ ID NO: 34670 - protein, 17 aa, Artificial Sequence
  Description of Artificial Sequence: Synthetic peptide
  XENP024254 vhCDR2
WINTYTGEPTYADGFTG

SEQ ID NO: 34671 - protein, 8 aa, Artificial Sequence
  Description of Artificial Sequence: Synthetic peptide
  XENP024254 vhCDR3
DYYGSSPY

SEQ ID NO: 34672 - protein, 16 aa, Artificial Sequence
  Description of Artificial Sequence: Synthetic peptide
  XENP024254 vlCDR1
KSSQSIVHSNGNTYLE

SEQ ID NO: 34673 - protein, 7 aa, Artificial Sequence
  Description of Artificial Sequence: Synthetic peptide
  XENP024254 vlCDR2
KVSNRFS

SEQ ID NO: 34674 - protein, 9 aa, Artificial Sequence
  Description of Artificial Sequence: Synthetic peptide
  XENP024254 vlCDR3
FQGSHVPNT

SEQ ID NO: 34675 - protein, 251 aa, Artificial Sequence
  Description of Artificial Sequence: Synthetic polypeptide
  XENP024255 1C11_H3.130_L3_scFv
QIQLVQSGSELKKPGASVKVSCKASGYTFTHYGMNWVRQAPGQGLEWMSWINTYTGEPTYADGFTGRFVFSLDTSVSTAYLQISSLKAEDTAVYFCARDYYGSSPYWGQGTLVTVSSGKPGSGKPGSGKPGSGKPGSDVLMTQSPDSLAVSLGERATINCKSSQSIVHSNGNTYLEWYQQKPGQSPKLLIYKVSNRFSGVPDRFSGSGSGTDFTLTISSLQAEDVAVYYCFQGSHVPNTFGGGTKVEIKGS

SEQ ID NO: 34676 - protein, 117 aa, Artificial Sequence
  Description of Artificial Sequence: Synthetic polypeptide
  VH of XENP024255
QIQLVQSGSELKKPGASVKVSCKASGYTFTHYGMNWVRQAPGQGLEWMSWINTYTGEPTYADGFTGRFVFSLDTSVSTAYLQISSLKAEDTAVYFCARDYYGSSPYWGQGTLVTVSS

SEQ ID NO: 34677 - protein, 114 aa, Artificial Sequence; identical to SEQ ID NO: 33651
  Description of Artificial Sequence: Synthetic polypeptide
  VL of XENP024255

SEQ ID NO: 34678 - protein, 5 aa, Artificial Sequence
  Description of Artificial Sequence: Synthetic peptide
  XENP024255 vhCDR1
HYGMN

SEQ ID NO: 34679 - protein, 17 aa, Artificial Sequence
  Description of Artificial Sequence: Synthetic peptide
  XENP024255 vhCDR2
WINTYTGEPTYADGFTG

SEQ ID NO: 34680 - protein, 8 aa, Artificial Sequence
  Description of Artificial Sequence: Synthetic peptide
  XENP024255 vhCDR3
DYYGSSPY

SEQ ID NO: 34681 - protein, 16 aa, Artificial Sequence
  Description of Artificial Sequence: Synthetic peptide
  XENP024255 vlCDR1
KSSQSIVHSNGNTYLE

SEQ ID NO: 34682 - protein, 7 aa, Artificial Sequence
  Description of Artificial Sequence: Synthetic peptide
  XENP024255 vlCDR2
KVSNRFS

SEQ ID NO: 34683 - protein, 9 aa, Artificial Sequence
  Description of Artificial Sequence: Synthetic peptide
  XENP024255 vlCDR3
FQGSHVPNT

SEQ ID NO: 34684 - protein, 251 aa, Artificial Sequence
  Description of Artificial Sequence: Synthetic polypeptide
  XENP024256 1C11_H3.134_L3_scFv
QIQLVQSGSELKKPGASVKVSCKASGYTFTHYGMNWVRQAPGQGLEWMGWINTKTGEPTYADGFTGRFVFSLDTSVSTAYLQISSLKAEDTAVYFCARDYYGSSPYWGQGTLVTVSSGKPGSGKPGSGKPGSGKPGSDVLMTQSPDSLAVSLGERATINCKSSQSIVHSNGNTYLEWYQQKPGQSPKLLIYKVSNRFSGVPDRFSGSGSGTDFTLTISSLQAEDVAVYYCFQGSHVPNTFGGGTKVEIKGS

SEQ ID NO: 34685 - protein, 117 aa, Artificial Sequence
  Description of Artificial Sequence: Synthetic polypeptide
  VH of XENP024256
QIQLVQSGSELKKPGASVKVSCKASGYTFTHYGMNWVRQAPGQGLEWMGWINTKTGEPTYADGFTGRFVFSLDTSVSTAYLQISSLKAEDTAVYFCARDYYGSSPYWGQGTLVTVSS

SEQ ID NO: 34686 - protein, 114 aa, Artificial Sequence; identical to SEQ ID NO: 33651
  Description of Artificial Sequence: Synthetic polypeptide
  VL of XENP024256

SEQ ID NO: 34687 - protein, 5 aa, Artificial Sequence
  Description of Artificial Sequence: Synthetic peptide
  XENP024256 vhCDR1
HYGMN

SEQ ID NO: 34688 - protein, 17 aa, Artificial Sequence
  Description of Artificial Sequence: Synthetic peptide
  XENP024256 vhCDR2
WINTKTGEPTYADGFTG

SEQ ID NO: 34689 - protein, 8 aa, Artificial Sequence
  Description of Artificial Sequence: Synthetic peptide
  XENP024256 vhCDR3
DYYGSSPY

SEQ ID NO: 34690 - protein, 16 aa, Artificial Sequence
  Description of Artificial Sequence: Synthetic peptide
  XENP024256 vlCDR1
KSSQSIVHSNGNTYLE

SEQ ID NO: 34691 - protein, 7 aa, Artificial Sequence
  Description of Artificial Sequence: Synthetic peptide
  XENP024256 vlCDR2
KVSNRFS

SEQ ID NO: 34692 - protein, 9 aa, Artificial Sequence
  Description of Artificial Sequence: Synthetic peptide
  XENP024256 vlCDR3
FQGSHVPNT

SEQ ID NO: 34693 - protein, 251 aa, Artificial Sequence
  Description of Artificial Sequence: Synthetic polypeptide
  XENP024257 1C11_H3.135_L3_scFv
QIQLVQSGSELKKPGASVKVSCKASGYTFTHYGMNWVRQAPGQGLEWMGWINTYTSEPTYADGFTGRFVFSLDTSVSTAYLQISSLKAEDTAVYFCARDYYGSSPYWGQGTLVTVSSGKPGSGKPGSGKPGSGKPGSDVLMTQSPDSLAVSLGERATINCKSSQSIVHSNGNTYLEWYQQKPGQSPKLLIYKVSNRFSGVPDRFSGSGSGTDFTLTISSLQAEDVAVYYCFQGSHVPNTFGGGTKVEIKGS

SEQ ID NO: 34694 - protein, 117 aa, Artificial Sequence
  Description of Artificial Sequence: Synthetic polypeptide
  VH of XENP024257
QIQLVQSGSELKKPGASVKVSCKASGYTFTHYGMNWVRQAPGQGLEWMGWINTYTSEPTYADGFTGRFVFSLDTSVSTAYLQISSLKAEDTAVYFCARDYYGSSPYWGQGTLVTVSS

SEQ ID NO: 34695 - protein, 114 aa, Artificial Sequence; identical to SEQ ID NO: 33651
  Description of Artificial Sequence: Synthetic polypeptide
  VL of XENP024257

SEQ ID NO: 34696 - protein, 5 aa, Artificial Sequence
  Description of Artificial Sequence: Synthetic peptide
  XENP024257 vhCDR1
HYGMN

SEQ ID NO: 34697 - protein, 17 aa, Artificial Sequence
  Description of Artificial Sequence: Synthetic peptide
  XENP024257 vhCDR2
WINTYTSEPTYADGFTG

SEQ ID NO: 34698 - protein, 8 aa, Artificial Sequence
  Description of Artificial Sequence: Synthetic peptide
  XENP024257 vhCDR3
DYYGSSPY

SEQ ID NO: 34699 - protein, 16 aa, Artificial Sequence
  Description of Artificial Sequence: Synthetic peptide
  XENP024257 vlCDR1
KSSQSIVHSNGNTYLE

SEQ ID NO: 34700 - protein, 7 aa, Artificial Sequence
  Description of Artificial Sequence: Synthetic peptide
  XENP024257 vlCDR2
KVSNRFS

SEQ ID NO: 34701 - protein, 9 aa, Artificial Sequence
  Description of Artificial Sequence: Synthetic peptide
  XENP024257 vlCDR3
FQGSHVPNT

SEQ ID NO: 34702 - protein, 251 aa, Artificial Sequence
  Description of Artificial Sequence: Synthetic polypeptide
  XENP024258 1C11_H3.136_L3_scFv
QIQLVQSGSELKKPGASVKVSCKASGYTFTHYGMNWVRQAPGQGLEWMGWINTYTGSPTYADGFTGRFVFSLDTSVSTAYLQISSLKAEDTAVYFCARDYYGSSPYWGQGTLVTVSSGKPGSGKPGSGKPGSGKPGSDVLMTQSPDSLAVSLGERATINCKSSQSIVHSNGNTYLEWYQQKPGQSPKLLIYKVSNRFSGVPDRFSGSGSGTDFTLTISSLQAEDVAVYYCFQGSHVPNTFGGGTKVEIKGS

SEQ ID NO: 34703 - protein, 117 aa, Artificial Sequence
  Description of Artificial Sequence: Synthetic polypeptide
  VH of XENP024258
QIQLVQSGSELKKPGASVKVSCKASGYTFTHYGMNWVRQAPGQGLEWMGWINTYTGSPTYADGFTGRFVFSLDTSVSTAYLQISSLKAEDTAVYFCARDYYGSSPYWGQGTLVTVSS

SEQ ID NO: 34704 - protein, 114 aa, Artificial Sequence; identical to SEQ ID NO: 33651
  Description of Artificial Sequence: Synthetic polypeptide
  VL of XENP024258

SEQ ID NO: 34705 - protein, 5 aa, Artificial Sequence
  Description of Artificial Sequence: Synthetic peptide
  XENP024258 vhCDR1
HYGMN

SEQ ID NO: 34706 - protein, 17 aa, Artificial Sequence
  Description of Artificial Sequence: Synthetic peptide
  XENP024258 vhCDR2
WINTYTGSPTYADGFTG

SEQ ID NO: 34707 - protein, 8 aa, Artificial Sequence
  Description of Artificial Sequence: Synthetic peptide
  XENP024258 vhCDR3
DYYGSSPY

SEQ ID NO: 34708 - protein, 16 aa, Artificial Sequence
  Description of Artificial Sequence: Synthetic peptide
  XENP024258 vlCDR1
KSSQSIVHSNGNTYLE

SEQ ID NO: 34709 - protein, 7 aa, Artificial Sequence
  Description of Artificial Sequence: Synthetic peptide
  XENP024258 vlCDR2
KVSNRFS

SEQ ID NO: 34710 - protein, 9 aa, Artificial Sequence
  Description of Artificial Sequence: Synthetic peptide
  XENP024258 vlCDR3
FQGSHVPNT

SEQ ID NO: 34711 - protein, 251 aa, Artificial Sequence
  Description of Artificial Sequence: Synthetic polypeptide
  XENP024259 1C11_H3.137_L3_scFv
QIQLVQSGSELKKPGASVKVSCKASGYTFTHYGMNWVRQAPGQGLEWMGWINTYTGNPTYADGFTGRFVFSLDTSVSTAYLQISSLKAEDTAVYFCARDYYGSSPYWGQGTLVTVSSGKPGSGKPGSGKPGSGKPGSDVLMTQSPDSLAVSLGERATINCKSSQSIVHSNGNTYLEWYQQKPGQSPKLLIYKVSNRFSGVPDRFSGSGSGTDFTLTISSLQAEDVAVYYCFQGSHVPNTFGGGTKVEIKGS

SEQ ID NO: 34712 - protein, 117 aa, Artificial Sequence
  Description of Artificial Sequence: Synthetic polypeptide
  VH of XENP024259
QIQLVQSGSELKKPGASVKVSCKASGYTFTHYGMNWVRQAPGQGLEWMGWINTYTGNPTYADGFTGRFVFSLDTSVSTAYLQISSLKAEDTAVYFCARDYYGSSPYWGQGTLVTVSS

SEQ ID NO: 34713 - protein, 114 aa, Artificial Sequence; identical to SEQ ID NO: 33651
  Description of Artificial Sequence: Synthetic polypeptide
  VL of XENP024259

SEQ ID NO: 34714 - protein, 5 aa, Artificial Sequence
  Description of Artificial Sequence: Synthetic peptide
  XENP024259 vhCDR1
HYGMN

SEQ ID NO: 34715 - protein, 17 aa, Artificial Sequence
  Description of Artificial Sequence: Synthetic peptide
  XENP024259 vhCDR2
WINTYTGNPTYADGFTG

SEQ ID NO: 34716 - protein, 8 aa, Artificial Sequence
  Description of Artificial Sequence: Synthetic peptide
  XENP024259 vhCDR3
DYYGSSPY

SEQ ID NO: 34717 - protein, 16 aa, Artificial Sequence
  Description of Artificial Sequence: Synthetic peptide
  XENP024259 vlCDR1
KSSQSIVHSNGNTYLE

SEQ ID NO: 34718 - protein, 7 aa, Artificial Sequence
  Description of Artificial Sequence: Synthetic peptide
  XENP024259 vlCDR2
KVSNRFS

SEQ ID NO: 34719 - protein, 9 aa, Artificial Sequence
  Description of Artificial Sequence: Synthetic peptide
  XENP024259 vlCDR3
FQGSHVPNT

SEQ ID NO: 34720 - protein, 251 aa, Artificial Sequence
  Description of Artificial Sequence: Synthetic polypeptide
  XENP024260 1C11_H3.138_L3_scFv
QIQLVQSGSELKKPGASVKVSCKASGYTFTHYGMNWVRQAPGQGLEWMGWINTYTGDPTYADGFTGRFVFSLDTSVSTAYLQISSLKAEDTAVYFCARDYYGSSPYWGQGTLVTVSSGKPGSGKPGSGKPGSGKPGSDVLMTQSPDSLAVSLGERATINCKSSQSIVHSNGNTYLEWYQQKPGQSPKLLIYKVSNRFSGVPDRFSGSGSGTDFTLTISSLQAEDVAVYYCFQGSHVPNTFGGGTKVEIKGS

SEQ ID NO: 34721 - protein, 117 aa, Artificial Sequence
  Description of Artificial Sequence: Synthetic polypeptide
  VH of XENP024260
QIQLVQSGSELKKPGASVKVSCKASGYTFTHYGMNWVRQAPGQGLEWMGWINTYTGDPTYADGFTGRFVFSLDTSVSTAYLQISSLKAEDTAVYFCARDYYGSSPYWGQGTLVTVSS

SEQ ID NO: 34722 - protein, 114 aa, Artificial Sequence; identical to SEQ ID NO: 33651
  Description of Artificial Sequence: Synthetic polypeptide
  VL of XENP024260

SEQ ID NO: 34723 - protein, 5 aa, Artificial Sequence
  Description of Artificial Sequence: Synthetic peptide
  XENP024260 vhCDR1
HYGMN

SEQ ID NO: 34724 - protein, 17 aa, Artificial Sequence
  Description of Artificial Sequence: Synthetic peptide
  XENP024260 vhCDR2
WINTYTGDPTYADGFTG

SEQ ID NO: 34725 - protein, 8 aa, Artificial Sequence
  Description of Artificial Sequence: Synthetic peptide
  XENP024260 vhCDR3
DYYGSSPY

SEQ ID NO: 34726 - protein, 16 aa, Artificial Sequence
  Description of Artificial Sequence: Synthetic peptide
  XENP024260 vlCDR1
KSSQSIVHSNGNTYLE

SEQ ID NO: 34727 - protein, 7 aa, Artificial Sequence
  Description of Artificial Sequence: Synthetic peptide
  XENP024260 vlCDR2
KVSNRFS

SEQ ID NO: 34728 - protein, 9 aa, Artificial Sequence
  Description of Artificial Sequence: Synthetic peptide
  XENP024260 vlCDR3
FQGSHVPNT

SEQ ID NO: 34729 - protein, 251 aa, Artificial Sequence
  Description of Artificial Sequence: Synthetic polypeptide
  XENP024261 1C11_H3.139_L3_scFv
QIQLVQSGSELKKPGASVKVSCKASGYTFTHYGMNWVRQAPGQGLEWMGWINTYTGTPTYADGFTGRFVFSLDTSVSTAYLQISSLKAEDTAVYFCARDYYGSSPYWGQGTLVTVSSGKPGSGKPGSGKPGSGKPGSDVLMTQSPDSLAVSLGERATINCKSSQSIVHSNGNTYLEWYQQKPGQSPKLLIYKVSNRFSGVPDRFSGSGSGTDFTLTISSLQAEDVAVYYCFQGSHVPNTFGGGTKVEIKGS

SEQ ID NO: 34730 - protein, 117 aa, Artificial Sequence
  Description of Artificial Sequence: Synthetic polypeptide
  VH of XENP024261
QIQLVQSGSELKKPGASVKVSCKASGYTFTHYGMNWVRQAPGQGLEWMGWINTYTGTPTYADGFTGRFVFSLDTSVSTAYLQISSLKAEDTAVYFCARDYYGSSPYWGQGTLVTVSS

SEQ ID NO: 34731 - protein, 114 aa, Artificial Sequence; identical to SEQ ID NO: 33651
  Description of Artificial Sequence: Synthetic polypeptide
  VL of XENP024261

SEQ ID NO: 34732 - protein, 5 aa, Artificial Sequence
  Description of Artificial Sequence: Synthetic peptide
  XENP024261 vhCDR1
HYGMN

SEQ ID NO: 34733 - protein, 17 aa, Artificial Sequence
  Description of Artificial Sequence: Synthetic peptide
  XENP024261 vhCDR2
WINTYTGTPTYADGFTG

SEQ ID NO: 34734 - protein, 8 aa, Artificial Sequence
  Description of Artificial Sequence: Synthetic peptide
  XENP024261 vhCDR3
DYYGSSPY

SEQ ID NO: 34735 - protein, 16 aa, Artificial Sequence
  Description of Artificial Sequence: Synthetic peptide
  XENP024261 vlCDR1
KSSQSIVHSNGNTYLE

SEQ ID NO: 34736 - protein, 7 aa, Artificial Sequence
  Description of Artificial Sequence: Synthetic peptide
  XENP024261 vlCDR2
KVSNRFS

SEQ ID NO: 34737 - protein, 9 aa, Artificial Sequence
  Description of Artificial Sequence: Synthetic peptide
  XENP024261 vlCDR3
FQGSHVPNT

SEQ ID NO: 34738 - protein, 251 aa, Artificial Sequence
  Description of Artificial Sequence: Synthetic polypeptide
  XENP024262 1C11_H3.140_L3_scFv
QIQLVQSGSELKKPGASVKVSCKASGYTFTHYGMNWVRQAPGQGLEWMGWINTYTGYPTYADGFTGRFVFSLDTSVSTAYLQISSLKAEDTAVYFCARDYYGSSPYWGQGTLVTVSSGKPGSGKPGSGKPGSGKPGSDVLMTQSPDSLAVSLGERATINCKSSQSIVHSNGNTYLEWYQQKPGQSPKLLIYKVSNRFSGVPDRFSGSGSGTDFTLTISSLQAEDVAVYYCFQGSHVPNTFGGGTKVEIKGS

SEQ ID NO: 34739 - protein, 117 aa, Artificial Sequence
  Description of Artificial Sequence: Synthetic polypeptide
  VH of XENP024262
QIQLVQSGSELKKPGASVKVSCKASGYTFTHYGMNWVRQAPGQGLEWMGWINTYTGYPTYADGFTGRFVFSLDTSVSTAYLQISSLKAEDTAVYFCARDYYGSSPYWGQGTLVTVSS

SEQ ID NO: 34740 - protein, 114 aa, Artificial Sequence; identical to SEQ ID NO: 33651
  Description of Artificial Sequence: Synthetic polypeptide
  VL of XENP024262

SEQ ID NO: 34741 - protein, 5 aa, Artificial Sequence
  Description of Artificial Sequence: Synthetic peptide
  XENP024262 vhCDR1
HYGMN

SEQ ID NO: 34742 - protein, 17 aa, Artificial Sequence
  Description of Artificial Sequence: Synthetic peptide
  XENP024262 vhCDR2
WINTYTGYPTYADGFTG

SEQ ID NO: 34743 - protein, 8 aa, Artificial Sequence
  Description of Artificial Sequence: Synthetic peptide
  XENP024262 vhCDR3
DYYGSSPY

SEQ ID NO: 34744 - protein, 16 aa, Artificial Sequence
  Description of Artificial Sequence: Synthetic peptide
  XENP024262 vlCDR1
KSSQSIVHSNGNTYLE

SEQ ID NO: 34745 - protein, 7 aa, Artificial Sequence
  Description of Artificial Sequence: Synthetic peptide
  XENP024262 vlCDR2
KVSNRFS

SEQ ID NO: 34746 - protein, 9 aa, Artificial Sequence
  Description of Artificial Sequence: Synthetic peptide
  XENP024262 vlCDR3
FQGSHVPNT

SEQ ID NO: 34747 - protein, 251 aa, Artificial Sequence
  Description of Artificial Sequence: Synthetic polypeptide
  XENP024263 1C11_H3.143_L3_scFv
QIQLVQSGSELKKPGASVKVSCKASGYTFTHYGMNWVRQAPGQGLEWMGWINTYTGEPYYADGFTGRFVFSLDTSVSTAYLQISSLKAEDTAVYFCARDYYGSSPYWGQGTLVTVSSGKPGSGKPGSGKPGSGKPGSDVLMTQSPDSLAVSLGERATINCKSSQSIVHSNGNTYLEWYQQKPGQSPKLLIYKVSNRFSGVPDRFSGSGSGTDFTLTISSLQAEDVAVYYCFQGSHVPNTFGGGTKVEIKGS

SEQ ID NO: 34748 - protein, 117 aa, Artificial Sequence
  Description of Artificial Sequence: Synthetic polypeptide
  VH of XENP024263
QIQLVQSGSELKKPGASVKVSCKASGYTFTHYGMNWVRQAPGQGLEWMGWINTYTGEPYYADGFTGRFVFSLDTSVSTAYLQISSLKAEDTAVYFCARDYYGSSPYWGQGTLVTVSS

SEQ ID NO: 34749 - protein, 114 aa, Artificial Sequence; identical to SEQ ID NO: 33651
  Description of Artificial Sequence: Synthetic polypeptide
  VL of XENP024263

SEQ ID NO: 34750 - protein, 5 aa, Artificial Sequence
  Description of Artificial Sequence: Synthetic peptide
  XENP024263 vhCDR1
HYGMN

SEQ ID NO: 34751 - protein, 17 aa, Artificial Sequence
  Description of Artificial Sequence: Synthetic peptide
  XENP024263 vhCDR2
WINTYTGEPYYADGFTG

SEQ ID NO: 34752 - protein, 8 aa, Artificial Sequence
  Description of Artificial Sequence: Synthetic peptide
  XENP024263 vhCDR3
DYYGSSPY

SEQ ID NO: 34753 - protein, 16 aa, Artificial Sequence
  Description of Artificial Sequence: Synthetic peptide
  XENP024263 vlCDR1
KSSQSIVHSNGNTYLE

SEQ ID NO: 34754 - protein, 7 aa, Artificial Sequence
  Description of Artificial Sequence: Synthetic peptide
  XENP024263 vlCDR2
KVSNRFS

SEQ ID NO: 34755 - protein, 9 aa, Artificial Sequence
  Description of Artificial Sequence: Synthetic peptide
  XENP024263 vlCDR3
FQGSHVPNT

SEQ ID NO: 34756 - protein, 251 aa, Artificial Sequence
  Description of Artificial Sequence: Synthetic polypeptide
  XENP024264 1C11_H3.144_L3_scFv
QIQLVQSGSELKKPGASVKVSCKASGYTFTHYGMNWVRQAPGQGLEWMGWINTYTGEPNYADGFTGRFVFSLDTSVSTAYLQISSLKAEDTAVYFCARDYYGSSPYWGQGTLVTVSSGKPGSGKPGSGKPGSGKPGSDVLMTQSPDSLAVSLGERATINCKSSQSIVHSNGNTYLEWYQQKPGQSPKLLIYKVSNRFSGVPDRFSGSGSGTDFTLTISSLQAEDVAVYYCFQGSHVPNTFGGGTKVEIKGS

SEQ ID NO: 34757 - protein, 117 aa, Artificial Sequence
  Description of Artificial Sequence: Synthetic polypeptide
  VH of XENP024264
QIQLVQSGSELKKPGASVKVSCKASGYTFTHYGMNWVRQAPGQGLEWMGWINTYTGEPNYADGFTGRFVFSLDTSVSTAYLQISSLKAEDTAVYFCARDYYGSSPYWGQGTLVTVSS

SEQ ID NO: 34758 - protein, 114 aa, Artificial Sequence; identical to SEQ ID NO: 33651
  Description of Artificial Sequence: Synthetic polypeptide
  VL of XENP024264

SEQ ID NO: 34759 - protein, 5 aa, Artificial Sequence
  Description of Artificial Sequence: Synthetic peptide
  XENP024264 vhCDR1
HYGMN

SEQ ID NO: 34760 - protein, 17 aa, Artificial Sequence
  Description of Artificial Sequence: Synthetic peptide
  XENP024264 vhCDR2
WINTYTGEPNYADGFTG

SEQ ID NO: 34761 - protein, 8 aa, Artificial Sequence
  Description of Artificial Sequence: Synthetic peptide
  XENP024264 vhCDR3
DYYGSSPY

SEQ ID NO: 34762 - protein, 16 aa, Artificial Sequence
  Description of Artificial Sequence: Synthetic peptide
  XENP024264 vlCDR1
KSSQSIVHSNGNTYLE

SEQ ID NO: 34763 - protein, 7 aa, Artificial Sequence
  Description of Artificial Sequence: Synthetic peptide
  XENP024264 vlCDR2
KVSNRFS

SEQ ID NO: 34764 - protein, 9 aa, Artificial Sequence
  Description of Artificial Sequence: Synthetic peptide
  XENP024264 vlCDR3
FQGSHVPNT

SEQ ID NO: 34765 - protein, 251 aa, Artificial Sequence
  Description of Artificial Sequence: Synthetic polypeptide
  XENP024265 1C11_H3.145_L3_scFv
QIQLVQSGSELKKPGASVKVSCKASGYTFTHYGMNWVRQAPGQGLEWMGWINTYTGEPTYSDGFTGRFVFSLDTSVSTAYLQISSLKAEDTAVYFCARDYYGSSPYWGQGTLVTVSSGKPGSGKPGSGKPGSGKPGSDVLMTQSPDSLAVSLGERATINCKSSQSIVHSNGNTYLEWYQQKPGQSPKLLIYKVSNRFSGVPDRFSGSGSGTDFTLTISSLQAEDVAVYYCFQGSHVPNTFGGGTKVEIKGS

SEQ ID NO: 34766 - protein, 117 aa, Artificial Sequence
  Description of Artificial Sequence: Synthetic polypeptide
  VH of XENP024265
QIQLVQSGSELKKPGASVKVSCKASGYTFTHYGMNWVRQAPGQGLEWMGWINTYTGEPTYSDGFTGRFVFSLDTSVSTAYLQISSLKAEDTAVYFCARDYYGSSPYWGQGTLVTVSS

SEQ ID NO: 34767 - protein, 114 aa, Artificial Sequence; identical to SEQ ID NO: 33651
  Description of Artificial Sequence: Synthetic polypeptide
  VL of XENP024265

SEQ ID NO: 34768 - protein, 5 aa, Artificial Sequence
  Description of Artificial Sequence: Synthetic peptide
  XENP024265 vhCDR1
HYGMN

SEQ ID NO: 34769 - protein, 17 aa, Artificial Sequence
  Description of Artificial Sequence: Synthetic peptide
  XENP024265 vhCDR2
WINTYTGEPTYSDGFTG

SEQ ID NO: 34770 - protein, 8 aa, Artificial Sequence
  Description of Artificial Sequence: Synthetic peptide
  XENP024265 vhCDR3
DYYGSSPY

SEQ ID NO: 34771 - protein, 16 aa, Artificial Sequence
  Description of Artificial Sequence: Synthetic peptide
  XENP024265 vlCDR1
KSSQSIVHSNGNTYLE

SEQ ID NO: 34772 - protein, 7 aa, Artificial Sequence
  Description of Artificial Sequence: Synthetic peptide
  XENP024265 vlCDR2
KVSNRFS

SEQ ID NO: 34773 - protein, 9 aa, Artificial Sequence
  Description of Artificial Sequence: Synthetic peptide
  XENP024265 vlCDR3
FQGSHVPNT

SEQ ID NO: 34774 - protein, 251 aa, Artificial Sequence
  Description of Artificial Sequence: Synthetic polypeptide
  XENP024266 1C11_H3.146_L3_scFv
QIQLVQSGSELKKPGASVKVSCKASGYTFTHYGMNWVRQAPGQGLEWMGWINTYTGEPTYAPGFTGRFVFSLDTSVSTAYLQISSLKAEDTAVYFCARDYYGSSPYWGQGTLVTVSSGKPGSGKPGSGKPGSGKPGSDVLMTQSPDSLAVSLGERATINCKSSQSIVHSNGNTYLEWYQQKPGQSPKLLIYKVSNRFSGVPDRFSGSGSGTDFTLTISSLQAEDVAVYYCFQGSHVPNTFGGGTKVEIKGS

SEQ ID NO: 34775 - protein, 117 aa, Artificial Sequence
  Description of Artificial Sequence: Synthetic polypeptide
  VH of XENP024266
QIQLVQSGSELKKPGASVKVSCKASGYTFTHYGMNWVRQAPGQGLEWMGWINTYTGEPTYAPGFTGRFVFSLDTSVSTAYLQISSLKAEDTAVYFCARDYYGSSPYWGQGTLVTVSS

SEQ ID NO: 34776 - protein, 114 aa, Artificial Sequence; identical to SEQ ID NO: 33651
  Description of Artificial Sequence: Synthetic polypeptide
  VL of XENP024266

SEQ ID NO: 34777 - protein, 5 aa, Artificial Sequence
  Description of Artificial Sequence: Synthetic peptide
  XENP024266 vhCDR1
HYGMN

SEQ ID NO: 34778 - protein, 17 aa, Artificial Sequence
  Description of Artificial Sequence: Synthetic peptide
  XENP024266 vhCDR2
WINTYTGEPTYAPGFTG

SEQ ID NO: 34779 - protein, 8 aa, Artificial Sequence
  Description of Artificial Sequence: Synthetic peptide
  XENP024266 vhCDR3
DYYGSSPY

SEQ ID NO: 34780 - protein, 16 aa, Artificial Sequence
  Description of Artificial Sequence: Synthetic peptide
  XENP024266 vlCDR1
KSSQSIVHSNGNTYLE

SEQ ID NO: 34781 - protein, 7 aa, Artificial Sequence
  Description of Artificial Sequence: Synthetic peptide
  XENP024266 vlCDR2
KVSNRFS

SEQ ID NO: 34782 - protein, 9 aa, Artificial Sequence
  Description of Artificial Sequence: Synthetic peptide
  XENP024266 vlCDR3
FQGSHVPNT

SEQ ID NO: 34783 - protein, 251 aa, Artificial Sequence
  Description of Artificial Sequence: Synthetic polypeptide
  XENP024267 1C11_H3.147_L3_scFv
QIQLVQSGSELKKPGASVKVSCKASGYTFTHYGMNWVRQAPGQGLEWMGWINTYTGEPTYATGFTGRFVFSLDTSVSTAYLQISSLKAEDTAVYFCARDYYGSSPYWGQGTLVTVSSGKPGSGKPGSGKPGSGKPGSDVLMTQSPDSLAVSLGERATINCKSSQSIVHSNGNTYLEWYQQKPGQSPKLLIYKVSNRFSGVPDRFSGSGSGTDFTLTISSLQAEDVAVYYCFQGSHVPNTFGGGTKVEIKGS

SEQ ID NO: 34784 - protein, 117 aa, Artificial Sequence
  Description of Artificial Sequence: Synthetic polypeptide
  VH of XENP024267
QIQLVQSGSELKKPGASVKVSCKASGYTFTHYGMNWVRQAPGQGLEWMGWINTYTGEPTYATGFTGRFVFSLDTSVSTAYLQISSLKAEDTAVYFCARDYYGSSPYWGQGTLVTVSS

SEQ ID NO: 34785 - protein, 114 aa, Artificial Sequence; identical to SEQ ID NO: 33651
  Description of Artificial Sequence: Synthetic polypeptide
  VL of XENP024267

SEQ ID NO: 34786 - protein, 5 aa, Artificial Sequence
  Description of Artificial Sequence: Synthetic peptide
  XENP024267 vhCDR1
HYGMN

SEQ ID NO: 34787 - protein, 17 aa, Artificial Sequence
  Description of Artificial Sequence: Synthetic peptide
  XENP024267 vhCDR2
WINTYTGEPTYATGFTG

SEQ ID NO: 34788 - protein, 8 aa, Artificial Sequence
  Description of Artificial Sequence: Synthetic peptide
  XENP024267 vhCDR3
DYYGSSPY

SEQ ID NO: 34789 - protein, 16 aa, Artificial Sequence
  Description of Artificial Sequence: Synthetic peptide
  XENP024267 vlCDR1
KSSQSIVHSNGNTYLE

SEQ ID NO: 34790 - protein, 7 aa, Artificial Sequence
  Description of Artificial Sequence: Synthetic peptide
  XENP024267 vlCDR2
KVSNRFS

SEQ ID NO: 34791 - protein, 9 aa, Artificial Sequence
  Description of Artificial Sequence: Synthetic peptide
  XENP024267 vlCDR3
FQGSHVPNT

SEQ ID NO: 34792 - protein, 251 aa, Artificial Sequence
  Description of Artificial Sequence: Synthetic polypeptide
  XENP024268 1C11_H3.148_L3_scFv
QIQLVQSGSELKKPGASVKVSCKASGYTFTHYGMNWVRQAPGQGLEWMGWINTYTGEPTYAQKFTGRFVFSLDTSVSTAYLQISSLKAEDTAVYFCARDYYGSSPYWGQGTLVTVSSGKPGSGKPGSGKPGSGKPGSDVLMTQSPDSLAVSLGERATINCKSSQSIVHSNGNTYLEWYQQKPGQSPKLLIYKVSNRFSGVPDRFSGSGSGTDFTLTISSLQAEDVAVYYCFQGSHVPNTFGGGTKVEIKGS

SEQ ID NO: 34793 - protein, 117 aa, Artificial Sequence
  Description of Artificial Sequence: Synthetic polypeptide
  VH of XENP024268
QIQLVQSGSELKKPGASVKVSCKASGYTFTHYGMNWVRQAPGQGLEWMGWINTYTGEPTYAQKFTGRFVFSLDTSVSTAYLQISSLKAEDTAVYFCARDYYGSSPYWGQGTLVTVSS

SEQ ID NO: 34794 - protein, 114 aa, Artificial Sequence; identical to SEQ ID NO: 33651
  Description of Artificial Sequence: Synthetic polypeptide
  VL of XENP024268

SEQ ID NO: 34795 - protein, 5 aa, Artificial Sequence
  Description of Artificial Sequence: Synthetic peptide
  XENP024268 vhCDR1
HYGMN

SEQ ID NO: 34796 - protein, 17 aa, Artificial Sequence
  Description of Artificial Sequence: Synthetic peptide
  XENP024268 vhCDR2
WINTYTGEPTYAQKFTG

SEQ ID NO: 34797 - protein, 8 aa, Artificial Sequence
  Description of Artificial Sequence: Synthetic peptide
  XENP024268 vhCDR3
DYYGSSPY

SEQ ID NO: 34798 - protein, 16 aa, Artificial Sequence
  Description of Artificial Sequence: Synthetic peptide
  XENP024268 vlCDR1
KSSQSIVHSNGNTYLE

SEQ ID NO: 34799 - protein, 7 aa, Artificial Sequence
  Description of Artificial Sequence: Synthetic peptide
  XENP024268 vlCDR2
KVSNRFS

SEQ ID NO: 34800 - protein, 9 aa, Artificial Sequence
  Description of Artificial Sequence: Synthetic peptide
  XENP024268 vlCDR3
FQGSHVPNT

SEQ ID NO: 34801 - protein, 251 aa, Artificial Sequence
  Description of Artificial Sequence: Synthetic polypeptide
  XENP024269 1C11_H3.149_L3_scFv
QIQLVQSGSELKKPGASVKVSCKASGYTFTHYGMNWVRQAPGQGLEWMGWINTYTGEPTYADGFTDRFVFSLDTSVSTAYLQISSLKAEDTAVYFCARDYYGSSPYWGQGTLVTVSSGKPGSGKPGSGKPGSGKPGSDVLMTQSPDSLAVSLGERATINCKSSQSIVHSNGNTYLEWYQQKPGQSPKLLIYKVSNRFSGVPDRFSGSGSGTDFTLTISSLQAEDVAVYYCFQGSHVPNTFGGGTKVEIKGS

SEQ ID NO: 34802 - protein, 117 aa, Artificial Sequence
  Description of Artificial Sequence: Synthetic polypeptide
  VH of XENP024269
QIQLVQSGSELKKPGASVKVSCKASGYTFTHYGMNWVRQAPGQGLEWMGWINTYTGEPTYADGFTDRFVFSLDTSVSTAYLQISSLKAEDTAVYFCARDYYGSSPYWGQGTLVTVSS

SEQ ID NO: 34803 - protein, 114 aa, Artificial Sequence; identical to SEQ ID NO: 33651
  Description of Artificial Sequence: Synthetic polypeptide
  VL of XENP024269

SEQ ID NO: 34804 - protein, 5 aa, Artificial Sequence
  Description of Artificial Sequence: Synthetic peptide
  XENP024269 vhCDR1
HYGMN

SEQ ID NO: 34805 - protein, 17 aa, Artificial Sequence
  Description of Artificial Sequence: Synthetic peptide
  XENP024269 vhCDR2
WINTYTGEPTYADGFTD

SEQ ID NO: 34806 - protein, 8 aa, Artificial Sequence
  Description of Artificial Sequence: Synthetic peptide
  XENP024269 vhCDR3
DYYGSSPY

SEQ ID NO: 34807 - protein, 16 aa, Artificial Sequence
  Description of Artificial Sequence: Synthetic peptide
  XENP024269 vlCDR1
KSSQSIVHSNGNTYLE

SEQ ID NO: 34808 - protein, 7 aa, Artificial Sequence
  Description of Artificial Sequence: Synthetic peptide
  XENP024269 vlCDR2
KVSNRFS

SEQ ID NO: 34809 - protein, 9 aa, Artificial Sequence
  Description of Artificial Sequence: Synthetic peptide
  XENP024269 vlCDR3
FQGSHVPNT

SEQ ID NO: 34810 - protein, 251 aa, Artificial Sequence
  Description of Artificial Sequence: Synthetic polypeptide
  XENP024270 1C11_H3.150_L3_scFv
QIQLVQSGSELKKPGASVKVSCKASGYTFTHYGMNWVRQAPGQGLEWMGWINTYTGEPTYADGFTERFVFSLDTSVSTAYLQISSLKAEDTAVYFCARDYYGSSPYWGQGTLVTVSSGKPGSGKPGSGKPGSGKPGSDVLMTQSPDSLAVSLGERATINCKSSQSIVHSNGNTYLEWYQQKPGQSPKLLIYKVSNRFSGVPDRFSGSGSGTDFTLTISSLQAEDVAVYYCFQGSHVPNTFGGGTKVEIKGS

SEQ ID NO: 34811 - protein, 117 aa, Artificial Sequence
  Description of Artificial Sequence: Synthetic polypeptide
  VH of XENP024270
QIQLVQSGSELKKPGASVKVSCKASGYTFTHYGMNWVRQAPGQGLEWMGWINTYTGEPTYADGFTERFVFSLDTSVSTAYLQISSLKAEDTAVYFCARDYYGSSPYWGQGTLVTVSS

SEQ ID NO: 34812 - protein, 114 aa, Artificial Sequence; identical to SEQ ID NO: 33651
  Description of Artificial Sequence: Synthetic polypeptide
  VL of XENP024270

SEQ ID NO: 34813 - protein, 5 aa, Artificial Sequence
  Description of Artificial Sequence: Synthetic peptide
  XENP024270 vhCDR1
HYGMN

SEQ ID NO: 34814 - protein, 17 aa, Artificial Sequence
  Description of Artificial Sequence: Synthetic peptide
  XENP024270 vhCDR2
WINTYTGEPTYADGFTE

SEQ ID NO: 34815 - protein, 8 aa, Artificial Sequence
  Description of Artificial Sequence: Synthetic peptide
  XENP024270 vhCDR3
DYYGSSPY

SEQ ID NO: 34816 - protein, 16 aa, Artificial Sequence
  Description of Artificial Sequence: Synthetic peptide
  XENP024270 vlCDR1
KSSQSIVHSNGNTYLE

SEQ ID NO: 34817 - protein, 7 aa, Artificial Sequence
  Description of Artificial Sequence: Synthetic peptide
  XENP024270 vlCDR2
KVSNRFS

SEQ ID NO: 34818 - protein, 9 aa, Artificial Sequence
  Description of Artificial Sequence: Synthetic peptide
  XENP024270 vlCDR3
FQGSHVPNT

SEQ ID NO: 34819 - protein, 251 aa, Artificial Sequence
  Description of Artificial Sequence: Synthetic polypeptide
  XENP024271 1C11_H3.151_L3_scFv
QIQLVQSGSELKKPGASVKVSCKASGYTFTHYGMNWVRQAPGQGLEWMGWINTYTGEPTYADGFTSRFVFSLDTSVSTAYLQISSLKAEDTAVYFCARDYYGSSPYWGQGTLVTVSSGKPGSGKPGSGKPGSGKPGSDVLMTQSPDSLAVSLGERATINCKSSQSIVHSNGNTYLEWYQQKPGQSPKLLIYKVSNRFSGVPDRFSGSGSGTDFTLTISSLQAEDVAVYYCFQGSHVPNTFGGGTKVEIKGS

SEQ ID NO: 34820 - protein, 117 aa, Artificial Sequence
  Description of Artificial Sequence: Synthetic polypeptide
  VH of XENP024271
QIQLVQSGSELKKPGASVKVSCKASGYTFTHYGMNWVRQAPGQGLEWMGWINTYTGEPTYADGFTSRFVFSLDTSVSTAYLQISSLKAEDTAVYFCARDYYGSSPYWGQGTLVTVSS

SEQ ID NO: 34821 - protein, 114 aa, Artificial Sequence; identical to SEQ ID NO: 33651
  Description of Artificial Sequence: Synthetic polypeptide
  VL of XENP024271

SEQ ID NO: 34822 - protein, 5 aa, Artificial Sequence
  Description of Artificial Sequence: Synthetic peptide
  XENP024271 vhCDR1
HYGMN

SEQ ID NO: 34823 - protein, 17 aa, Artificial Sequence
  Description of Artificial Sequence: Synthetic peptide
  XENP024271 vhCDR2
WINTYTGEPTYADGFTS

SEQ ID NO: 34824 - protein, 8 aa, Artificial Sequence
  Description of Artificial Sequence: Synthetic peptide
  XENP024271 vhCDR3
DYYGSSPY

SEQ ID NO: 34825 - protein, 16 aa, Artificial Sequence
  Description of Artificial Sequence: Synthetic peptide
  XENP024271 vlCDR1
KSSQSIVHSNGNTYLE

SEQ ID NO: 34826 - protein, 7 aa, Artificial Sequence
  Description of Artificial Sequence: Synthetic peptide
  XENP024271 vlCDR2
KVSNRFS

SEQ ID NO: 34827 - protein, 9 aa, Artificial Sequence
  Description of Artificial Sequence: Synthetic peptide
  XENP024271 vlCDR3
FQGSHVPNT

SEQ ID NO: 34828 - protein, 251 aa, Artificial Sequence
  Description of Artificial Sequence: Synthetic polypeptide
  XENP024272 1C11_H3.152_L3_scFv
QIQLVQSGSELKKPGASVKVSCKASGYTFTHYGMNWVRQAPGQGLEWMGWINTYTGEPTYADGFTGRFVFTLDTSVSTAYLQISSLKAEDTAVYFCARDYYGSSPYWGQGTLVTVSSGKPGSGKPGSGKPGSGKPGSDVLMTQSPDSLAVSLGERATINCKSSQSIVHSNGNTYLEWYQQKPGQSPKLLIYKVSNRFSGVPDRFSGSGSGTDFTLTISSLQAEDVAVYYCFQGSHVPNTFGGGTKVEIKGS

SEQ ID NO: 34829 - protein, 117 aa, Artificial Sequence
  Description of Artificial Sequence: Synthetic polypeptide
  VH of XENP024272
QIQLVQSGSELKKPGASVKVSCKASGYTFTHYGMNWVRQAPGQGLEWMGWINTYTGEPTYADGFTGRFVFTLDTSVSTAYLQISSLKAEDTAVYFCARDYYGSSPYWGQGTLVTVSS

SEQ ID NO: 34830 - protein, 114 aa, Artificial Sequence; identical to SEQ ID NO: 33651
  Description of Artificial Sequence: Synthetic polypeptide
  VL of XENP024272

SEQ ID NO: 34831 - protein, 5 aa, Artificial Sequence
  Description of Artificial Sequence: Synthetic peptide
  XENP024272 vhCDR1
HYGMN

SEQ ID NO: 34832 - protein, 17 aa, Artificial Sequence
  Description of Artificial Sequence: Synthetic peptide
  XENP024272 vhCDR2
WINTYTGEPTYADGFTG

SEQ ID NO: 34833 - protein, 8 aa, Artificial Sequence
  Description of Artificial Sequence: Synthetic peptide
  XENP024272 vhCDR3
DYYGSSPY

SEQ ID NO: 34834 - protein, 16 aa, Artificial Sequence
  Description of Artificial Sequence: Synthetic peptide
  XENP024272 vlCDR1
KSSQSIVHSNGNTYLE

SEQ ID NO: 34835 - protein, 7 aa, Artificial Sequence
  Description of Artificial Sequence: Synthetic peptide
  XENP024272 vlCDR2
KVSNRFS

SEQ ID NO: 34836 - protein, 9 aa, Artificial Sequence
  Description of Artificial Sequence: Synthetic peptide
  XENP024272 vlCDR3
FQGSHVPNT

SEQ ID NO: 34837 - protein, 251 aa, Artificial Sequence
  Description of Artificial Sequence: Synthetic polypeptide
  XENP024273 1C11_H3.153_L3_scFv
QIQLVQSGSELKKPGASVKVSCKASGYTFTHYGMNWVRQAPGQGLEWMGWINTYTGEPTYADGFTGRFVFSTDTSVSTAYLQISSLKAEDTAVYFCARDYYGSSPYWGQGTLVTVSSGKPGSGKPGSGKPGSGKPGSDVLMTQSPDSLAVSLGERATINCKSSQSIVHSNGNTYLEWYQQKPGQSPKLLIYKVSNRFSGVPDRFSGSGSGTDFTLTISSLQAEDVAVYYCFQGSHVPNTFGGGTKVEIKGS

SEQ ID NO: 34838 - protein, 117 aa, Artificial Sequence
  Description of Artificial Sequence: Synthetic polypeptide
  VH of XENP024273
QIQLVQSGSELKKPGASVKVSCKASGYTFTHYGMNWVRQAPGQGLEWMGWINTYTGEPTYADGFTGRFVFSTDTSVSTAYLQISSLKAEDTAVYFCARDYYGSSPYWGQGTLVTVSS

SEQ ID NO: 34839 - protein, 114 aa, Artificial Sequence; identical to SEQ ID NO: 33651
  Description of Artificial Sequence: Synthetic polypeptide
  VL of XENP024273

SEQ ID NO: 34840 - protein, 5 aa, Artificial Sequence
  Description of Artificial Sequence: Synthetic peptide
  XENP024273 vhCDR1
HYGMN

SEQ ID NO: 34841 - protein, 17 aa, Artificial Sequence
  Description of Artificial Sequence: Synthetic peptide
  XENP024273 vhCDR2
WINTYTGEPTYADGFTG

SEQ ID NO: 34842 - protein, 8 aa, Artificial Sequence
  Description of Artificial Sequence: Synthetic peptide
  XENP024273 vhCDR3
DYYGSSPY

SEQ ID NO: 34843 - protein, 16 aa, Artificial Sequence
  Description of Artificial Sequence: Synthetic peptide
  XENP024273 vlCDR1
KSSQSIVHSNGNTYLE

SEQ ID NO: 34844 - protein, 7 aa, Artificial Sequence
  Description of Artificial Sequence: Synthetic peptide
  XENP024273 vlCDR2
KVSNRFS

SEQ ID NO: 34845 - protein, 9 aa, Artificial Sequence
  Description of Artificial Sequence: Synthetic peptide
  XENP024273 vlCDR3
FQGSHVPNT

SEQ ID NO: 34846 - protein, 251 aa, Artificial Sequence
  Description of Artificial Sequence: Synthetic polypeptide
  XENP024274 1C11_H3.154_L3_scFv
QIQLVQSGSELKKPGASVKVSCKASGYTFTHYGMNWVRQAPGQGLEWMGWINTYTGEPTYADGFTGRFVFSIDTSVSTAYLQISSLKAEDTAVYFCARDYYGSSPYWGQGTLVTVSSGKPGSGKPGSGKPGSGKPGSDVLMTQSPDSLAVSLGERATINCKSSQSIVHSNGNTYLEWYQQKPGQSPKLLIYKVSNRFSGVPDRFSGSGSGTDFTLTISSLQAEDVAVYYCFQGSHVPNTFGGGTKVEIKGS

SEQ ID NO: 34847 - protein, 117 aa, Artificial Sequence
  Description of Artificial Sequence: Synthetic polypeptide
  VH of XENP024274
QIQLVQSGSELKKPGASVKVSCKASGYTFTHYGMNWVRQAPGQGLEWMGWINTYTGEPTYADGFTGRFVFSIDTSVSTAYLQISSLKAEDTAVYFCARDYYGSSPYWGQGTLVTVSS

SEQ ID NO: 34848 - protein, 114 aa, Artificial Sequence; identical to SEQ ID NO: 33651
  Description of Artificial Sequence: Synthetic polypeptide
  VL of XENP024274

SEQ ID NO: 34849 - protein, 5 aa, Artificial Sequence
  Description of Artificial Sequence: Synthetic peptide
  XENP024274 vhCDR1
HYGMN

SEQ ID NO: 34850 - protein, 17 aa, Artificial Sequence
  Description of Artificial Sequence: Synthetic peptide
  XENP024274 vhCDR2
WINTYTGEPTYADGFTG

SEQ ID NO: 34851 - protein, 8 aa, Artificial Sequence
  Description of Artificial Sequence: Synthetic peptide
  XENP024274 vhCDR3
DYYGSSPY

SEQ ID NO: 34852 - protein, 16 aa, Artificial Sequence
  Description of Artificial Sequence: Synthetic peptide
  XENP024274 vlCDR1
KSSQSIVHSNGNTYLE

SEQ ID NO: 34853 - protein, 7 aa, Artificial Sequence
  Description of Artificial Sequence: Synthetic peptide
  XENP024274 vlCDR2
KVSNRFS

SEQ ID NO: 34854 - protein, 9 aa, Artificial Sequence
  Description of Artificial Sequence: Synthetic peptide
  XENP024274 vlCDR3
FQGSHVPNT

SEQ ID NO: 34855 - protein, 251 aa, Artificial Sequence
  Description of Artificial Sequence: Synthetic polypeptide
  XENP024275 1C11_H3.155_L3_scFv
QIQLVQSGSELKKPGASVKVSCKASGYTFTHYGMNWVRQAPGQGLEWMGWINTYTGEPTYADGFTGRFVFSLDNSVSTAYLQISSLKAEDTAVYFCARDYYGSSPYWGQGTLVTVSSGKPGSGKPGSGKPGSGKPGSDVLMTQSPDSLAVSLGERATINCKSSQSIVHSNGNTYLEWYQQKPGQSPKLLIYKVSNRFSGVPDRFSGSGSGTDFTLTISSLQAEDVAVYYCFQGSHVPNTFGGGTKVEIKGS

SEQ ID NO: 34856 - protein, 117 aa, Artificial Sequence
  Description of Artificial Sequence: Synthetic polypeptide
  VH of XENP024275
QIQLVQSGSELKKPGASVKVSCKASGYTFTHYGMNWVRQAPGQGLEWMGWINTYTGEPTYADGFTGRFVFSLDNSVSTAYLQISSLKAEDTAVYFCARDYYGSSPYWGQGTLVTVSS

SEQ ID NO: 34857 - protein, 114 aa, Artificial Sequence; identical to SEQ ID NO: 33651
  Description of Artificial Sequence: Synthetic polypeptide
  VL of XENP024275

SEQ ID NO: 34858 - protein, 5 aa, Artificial Sequence
  Description of Artificial Sequence: Synthetic peptide
  XENP024275 vhCDR1
HYGMN

SEQ ID NO: 34859 - protein, 17 aa, Artificial Sequence
  Description of Artificial Sequence: Synthetic peptide
  XENP024275 vhCDR2
WINTYTGEPTYADGFTG

SEQ ID NO: 34860 - protein, 8 aa, Artificial Sequence
  Description of Artificial Sequence: Synthetic peptide
  XENP024275 vhCDR3
DYYGSSPY

SEQ ID NO: 34861 - protein, 16 aa, Artificial Sequence
  Description of Artificial Sequence: Synthetic peptide
  XENP024275 vlCDR1
KSSQSIVHSNGNTYLE

SEQ ID NO: 34862 - protein, 7 aa, Artificial Sequence
  Description of Artificial Sequence: Synthetic peptide
  XENP024275 vlCDR2
KVSNRFS

SEQ ID NO: 34863 - protein, 9 aa, Artificial Sequence
  Description of Artificial Sequence: Synthetic peptide
  XENP024275 vlCDR3
FQGSHVPNT

SEQ ID NO: 34864 - protein, 251 aa, Artificial Sequence
  Description of Artificial Sequence: Synthetic polypeptide
  XENP024276 1C11_H3.156_L3_scFv
QIQLVQSGSELKKPGASVKVSCKASGYTFTHYGMNWVRQAPGQGLEWMGWINTYTGEPTYADGFTGRFVFSLDRSVSTAYLQISSLKAEDTAVYFCARDYYGSSPYWGQGTLVTVSSGKPGSGKPGSGKPGSGKPGSDVLMTQSPDSLAVSLGERATINCKSSQSIVHSNGNTYLEWYQQKPGQSPKLLIYKVSNRFSGVPDRFSGSGSGTDFTLTISSLQAEDVAVYYCFQGSHVPNTFGGGTKVEIKGS

SEQ ID NO: 34865 - protein, 117 aa, Artificial Sequence
  Description of Artificial Sequence: Synthetic polypeptide
  VH of XENP024276
QIQLVQSGSELKKPGASVKVSCKASGYTFTHYGMNWVRQAPGQGLEWMGWINTYTGEPTYADGFTGRFVFSLDRSVSTAYLQISSLKAEDTAVYFCARDYYGSSPYWGQGTLVTVSS

SEQ ID NO: 34866 - protein, 114 aa, Artificial Sequence; identical to SEQ ID NO: 33651
  Description of Artificial Sequence: Synthetic polypeptide
  VL of XENP024276

SEQ ID NO: 34867 - protein, 5 aa, Artificial Sequence
  Description of Artificial Sequence: Synthetic peptide
  XENP024276 vhCDR1
HYGMN

SEQ ID NO: 34868 - protein, 17 aa, Artificial Sequence
  Description of Artificial Sequence: Synthetic peptide
  XENP024276 vhCDR2
WINTYTGEPTYADGFTG

SEQ ID NO: 34869 - protein, 8 aa, Artificial Sequence
  Description of Artificial Sequence: Synthetic peptide
  XENP024276 vhCDR3
DYYGSSPY

SEQ ID NO: 34870 - protein, 16 aa, Artificial Sequence
  Description of Artificial Sequence: Synthetic peptide
  XENP024276 vlCDR1
KSSQSIVHSNGNTYLE

SEQ ID NO: 34871 - protein, 7 aa, Artificial Sequence
  Description of Artificial Sequence: Synthetic peptide
  XENP024276 vlCDR2
KVSNRFS

SEQ ID NO: 34872 - protein, 9 aa, Artificial Sequence
  Description of Artificial Sequence: Synthetic peptide
  XENP024276 vlCDR3
FQGSHVPNT

SEQ ID NO: 34873 - protein, 251 aa, Artificial Sequence
  Description of Artificial Sequence: Synthetic polypeptide
  XENP024277 1C11_H3.157_L3_scFv
QIQLVQSGSELKKPGASVKVSCKASGYTFTHYGMNWVRQAPGQGLEWMGWINTYTGEPTYADGFTGRFVFSLDTAVSTAYLQISSLKAEDTAVYFCARDYYGSSPYWGQGTLVTVSSGKPGSGKPGSGKPGSGKPGSDVLMTQSPDSLAVSLGERATINCKSSQSIVHSNGNTYLEWYQQKPGQSPKLLIYKVSNRFSGVPDRFSGSGSGTDFTLTISSLQAEDVAVYYCFQGSHVPNTFGGGTKVEIKGS

SEQ ID NO: 34874 - protein, 117 aa, Artificial Sequence
  Description of Artificial Sequence: Synthetic polypeptide
  VH of XENP024277
QIQLVQSGSELKKPGASVKVSCKASGYTFTHYGMNWVRQAPGQGLEWMGWINTYTGEPTYADGFTGRFVFSLDTAVSTAYLQISSLKAEDTAVYFCARDYYGSSPYWGQGTLVTVSS

SEQ ID NO: 34875 - protein, 114 aa, Artificial Sequence; identical to SEQ ID NO: 33651
  Description of Artificial Sequence: Synthetic polypeptide
  VL of XENP024277

SEQ ID NO: 34876 - protein, 5 aa, Artificial Sequence
  Description of Artificial Sequence: Synthetic peptide
  XENP024277 vhCDR1
HYGMN

SEQ ID NO: 34877 - protein, 17 aa, Artificial Sequence
  Description of Artificial Sequence: Synthetic peptide
  XENP024277 vhCDR2
WINTYTGEPTYADGFTG

SEQ ID NO: 34878 - protein, 8 aa, Artificial Sequence
  Description of Artificial Sequence: Synthetic peptide
  XENP024277 vhCDR3
DYYGSSPY

SEQ ID NO: 34879 - protein, 16 aa, Artificial Sequence
  Description of Artificial Sequence: Synthetic peptide
  XENP024277 vlCDR1
KSSQSIVHSNGNTYLE

SEQ ID NO: 34880 - protein, 7 aa, Artificial Sequence
  Description of Artificial Sequence: Synthetic peptide
  XENP024277 vlCDR2
KVSNRFS

SEQ ID NO: 34881 - protein, 9 aa, Artificial Sequence
  Description of Artificial Sequence: Synthetic peptide
  XENP024277 vlCDR3
FQGSHVPNT

SEQ ID NO: 34882 - protein, 251 aa, Artificial Sequence
  Description of Artificial Sequence: Synthetic polypeptide
  XENP024278 1C11_H3.158_L3_scFv
QIQLVQSGSELKKPGASVKVSCKASGYTFTHYGMNWVRQAPGQGLEWMGWINTYTGEPTYADGFTGRFVFSLDTSVNTAYLQISSLKAEDTAVYFCARDYYGSSPYWGQGTLVTVSSGKPGSGKPGSGKPGSGKPGSDVLMTQSPDSLAVSLGERATINCKSSQSIVHSNGNTYLEWYQQKPGQSPKLLIYKVSNRFSGVPDRFSGSGSGTDFTLTISSLQAEDVAVYYCFQGSHVPNTFGGGTKVEIKGS

SEQ ID NO: 34883 - protein, 117 aa, Artificial Sequence
  Description of Artificial Sequence: Synthetic polypeptide
  VH of XENP024278
QIQLVQSGSELKKPGASVKVSCKASGYTFTHYGMNWVRQAPGQGLEWMGWINTYTGEPTYADGFTGRFVFSLDTSVNTAYLQISSLKAEDTAVYFCARDYYGSSPYWGQGTLVTVSS

SEQ ID NO: 34884 - protein, 114 aa, Artificial Sequence; identical to SEQ ID NO: 33651
  Description of Artificial Sequence: Synthetic polypeptide
  VL of XENP024278

SEQ ID NO: 34885 - protein, 5 aa, Artificial Sequence
  Description of Artificial Sequence: Synthetic peptide
  XENP024278 vhCDR1
HYGMN

SEQ ID NO: 34886 - protein, 17 aa, Artificial Sequence
  Description of Artificial Sequence: Synthetic peptide
  XENP024278 vhCDR2
WINTYTGEPTYADGFTG

SEQ ID NO: 34887 - protein, 8 aa, Artificial Sequence
  Description of Artificial Sequence: Synthetic peptide
  XENP024278 vhCDR3
DYYGSSPY

SEQ ID NO: 34888 - protein, 16 aa, Artificial Sequence
  Description of Artificial Sequence: Synthetic peptide
  XENP024278 vlCDR1
KSSQSIVHSNGNTYLE

SEQ ID NO: 34889 - protein, 7 aa, Artificial Sequence
  Description of Artificial Sequence: Synthetic peptide
  XENP024278 vlCDR2
KVSNRFS

SEQ ID NO: 34890 - protein, 9 aa, Artificial Sequence
  Description of Artificial Sequence: Synthetic peptide
  XENP024278 vlCDR3
FQGSHVPNT

SEQ ID NO: 34891 - protein, 251 aa, Artificial Sequence
  Description of Artificial Sequence: Synthetic polypeptide
  XENP024279 1C11_H3.159_L3_scFv
QIQLVQSGSELKKPGASVKVSCKASGYTFTHYGMNWVRQAPGQGLEWMGWINTYTGEPTYADGFTGRFVFSLDTSVDTAYLQISSLKAEDTAVYFCARDYYGSSPYWGQGTLVTVSSGKPGSGKPGSGKPGSGKPGSDVLMTQSPDSLAVSLGERATINCKSSQSIVHSNGNTYLEWYQQKPGQSPKLLIYKVSNRFSGVPDRFSGSGSGTDFTLTISSLQAEDVAVYYCFQGSHVPNTFGGGTKVEIKGS

SEQ ID NO: 34892 - protein, 117 aa, Artificial Sequence
  Description of Artificial Sequence: Synthetic polypeptide
  VH of XENP024279
QIQLVQSGSELKKPGASVKVSCKASGYTFTHYGMNWVRQAPGQGLEWMGWINTYTGEPTYADGFTGRFVFSLDTSVDTAYLQISSLKAEDTAVYFCARDYYGSSPYWGQGTLVTVSS

SEQ ID NO: 34893 - protein, 114 aa, Artificial Sequence; identical to SEQ ID NO: 33651
  Description of Artificial Sequence: Synthetic polypeptide
  VL of XENP024279

SEQ ID NO: 34894 - protein, 5 aa, Artificial Sequence
  Description of Artificial Sequence: Synthetic peptide
  XENP024279 vhCDR1
HYGMN

SEQ ID NO: 34895 - protein, 17 aa, Artificial Sequence
  Description of Artificial Sequence: Synthetic peptide
  XENP024279 vhCDR2
WINTYTGEPTYADGFTG

SEQ ID NO: 34896 - protein, 8 aa, Artificial Sequence
  Description of Artificial Sequence: Synthetic peptide
  XENP024279 vhCDR3
DYYGSSPY

SEQ ID NO: 34897 - protein, 16 aa, Artificial Sequence
  Description of Artificial Sequence: Synthetic peptide
  XENP024279 vlCDR1
KSSQSIVHSNGNTYLE

SEQ ID NO: 34898 - protein, 7 aa, Artificial Sequence
  Description of Artificial Sequence: Synthetic peptide
  XENP024279 vlCDR2
KVSNRFS

SEQ ID NO: 34899 - protein, 9 aa, Artificial Sequence
  Description of Artificial Sequence: Synthetic peptide
  XENP024279 vlCDR3
FQGSHVPNT

SEQ ID NO: 34900 - protein, 251 aa, Artificial Sequence
  Description of Artificial Sequence: Synthetic polypeptide
  XENP024280 1C11_H3.160_L3_scFv
QIQLVQSGSELKKPGASVKVSCKASGYTFTHYGMNWVRQAPGQGLEWMGWINTYTGEPTYADGFTGRFVFSLDTSVSQAYLQISSLKAEDTAVYFCARDYYGSSPYWGQGTLVTVSSGKPGSGKPGSGKPGSGKPGSDVLMTQSPDSLAVSLGERATINCKSSQSIVHSNGNTYLEWYQQKPGQSPKLLIYKVSNRFSGVPDRFSGSGSGTDFTLTISSLQAEDVAVYYCFQGSHVPNTFGGGTKVEIKGS

SEQ ID NO: 34901 - protein, 117 aa, Artificial Sequence
  Description of Artificial Sequence: Synthetic polypeptide
  VH of XENP024280
QIQLVQSGSELKKPGASVKVSCKASGYTFTHYGMNWVRQAPGQGLEWMGWINTYTGEPTYADGFTGRFVFSLDTSVSQAYLQISSLKAEDTAVYFCARDYYGSSPYWGQGTLVTVSS

SEQ ID NO: 34902 - protein, 114 aa, Artificial Sequence; identical to SEQ ID NO: 33651
  Description of Artificial Sequence: Synthetic polypeptide
  VL of XENP024280

SEQ ID NO: 34903 - protein, 5 aa, Artificial Sequence
  Description of Artificial Sequence: Synthetic peptide
  XENP024280 vhCDR1
HYGMN

SEQ ID NO: 34904 - protein, 17 aa, Artificial Sequence
  Description of Artificial Sequence: Synthetic peptide
  XENP024280 vhCDR2
WINTYTGEPTYADGFTG

SEQ ID NO: 34905 - protein, 8 aa, Artificial Sequence
  Description of Artificial Sequence: Synthetic peptide
  XENP024280 vhCDR3
DYYGSSPY

SEQ ID NO: 34906 - protein, 16 aa, Artificial Sequence
  Description of Artificial Sequence: Synthetic peptide
  XENP024280 vlCDR1
KSSQSIVHSNGNTYLE

SEQ ID NO: 34907 - protein, 7 aa, Artificial Sequence
  Description of Artificial Sequence: Synthetic peptide
  XENP024280 vlCDR2
KVSNRFS

SEQ ID NO: 34908 - protein, 9 aa, Artificial Sequence
  Description of Artificial Sequence: Synthetic peptide
  XENP024280 vlCDR3
FQGSHVPNT

SEQ ID NO: 34909 - protein, 251 aa, Artificial Sequence
  Description of Artificial Sequence: Synthetic polypeptide
  XENP024281 1C11_H3.161_L3_scFv
QIQLVQSGSELKKPGASVKVSCKASGYTFTHYGMNWVRQAPGQGLEWMGWINTYTGEPTYADGFTGRFVFSLDTSVSSAYLQISSLKAEDTAVYFCARDYYGSSPYWGQGTLVTVSSGKPGSGKPGSGKPGSGKPGSDVLMTQSPDSLAVSLGERATINCKSSQSIVHSNGNTYLEWYQQKPGQSPKLLIYKVSNRFSGVPDRFSGSGSGTDFTLTISSLQAEDVAVYYCFQGSHVPNTFGGGTKVEIKGS

SEQ ID NO: 34910 - protein, 117 aa, Artificial Sequence
  Description of Artificial Sequence: Synthetic polypeptide
  VH of XENP024281
QIQLVQSGSELKKPGASVKVSCKASGYTFTHYGMNWVRQAPGQGLEWMGWINTYTGEPTYADGFTGRFVFSLDTSVSSAYLQISSLKAEDTAVYFCARDYYGSSPYWGQGTLVTVSS

SEQ ID NO: 34911 - protein, 114 aa, Artificial Sequence; identical to SEQ ID NO: 33651
  Description of Artificial Sequence: Synthetic polypeptide
  VL of XENP024281

SEQ ID NO: 34912 - protein, 5 aa, Artificial Sequence
  Description of Artificial Sequence: Synthetic peptide
  XENP024281 vhCDR1
HYGMN

SEQ ID NO: 34913 - protein, 17 aa, Artificial Sequence
  Description of Artificial Sequence: Synthetic peptide
  XENP024281 vhCDR2
WINTYTGEPTYADGFTG

SEQ ID NO: 34914 - protein, 8 aa, Artificial Sequence
  Description of Artificial Sequence: Synthetic peptide
  XENP024281 vhCDR3
DYYGSSPY

SEQ ID NO: 34915 - protein, 16 aa, Artificial Sequence
  Description of Artificial Sequence: Synthetic peptide
  XENP024281 vlCDR1
KSSQSIVHSNGNTYLE

SEQ ID NO: 34916 - protein, 7 aa, Artificial Sequence
  Description of Artificial Sequence: Synthetic peptide
  XENP024281 vlCDR2
KVSNRFS

SEQ ID NO: 34917 - protein, 9 aa, Artificial Sequence
  Description of Artificial Sequence: Synthetic peptide
  XENP024281 vlCDR3
FQGSHVPNT

SEQ ID NO: 34918 - protein, 251 aa, Artificial Sequence
  Description of Artificial Sequence: Synthetic polypeptide
  XENP024282 1C11_H3.162_L3_scFv
QIQLVQSGSELKKPGASVKVSCKASGYTFTHYGMNWVRQAPGQGLEWMGWINTYTGEPTYADGFTGRFVFSLDTSVSTLYLQISSLKAEDTAVYFCARDYYGSSPYWGQGTLVTVSSGKPGSGKPGSGKPGSGKPGSDVLMTQSPDSLAVSLGERATINCKSSQSIVHSNGNTYLEWYQQKPGQSPKLLIYKVSNRFSGVPDRFSGSGSGTDFTLTISSLQAEDVAVYYCFQGSHVPNTFGGGTKVEIKGS

SEQ ID NO: 34919 - protein, 117 aa, Artificial Sequence
  Description of Artificial Sequence: Synthetic polypeptide
  VH of XENP024282
QIQLVQSGSELKKPGASVKVSCKASGYTFTHYGMNWVRQAPGQGLEWMGWINTYTGEPTYADGFTGRFVFSLDTSVSTLYLQISSLKAEDTAVYFCARDYYGSSPYWGQGTLVTVSS

SEQ ID NO: 34920 - protein, 114 aa, Artificial Sequence; identical to SEQ ID NO: 33651
  Description of Artificial Sequence: Synthetic polypeptide
  VL of XENP024282

SEQ ID NO: 34921 - protein, 5 aa, Artificial Sequence
  Description of Artificial Sequence: Synthetic peptide
  XENP024282 vhCDR1
HYGMN

SEQ ID NO: 34922 - protein, 17 aa, Artificial Sequence
  Description of Artificial Sequence: Synthetic peptide
  XENP024282 vhCDR2
WINTYTGEPTYADGFTG

SEQ ID NO: 34923 - protein, 8 aa, Artificial Sequence
  Description of Artificial Sequence: Synthetic peptide
  XENP024282 vhCDR3
DYYGSSPY

SEQ ID NO: 34924 - protein, 16 aa, Artificial Sequence
  Description of Artificial Sequence: Synthetic peptide
  XENP024282 vlCDR1
KSSQSIVHSNGNTYLE

SEQ ID NO: 34925 - protein, 7 aa, Artificial Sequence
  Description of Artificial Sequence: Synthetic peptide
  XENP024282 vlCDR2
KVSNRFS

SEQ ID NO: 34926 - protein, 9 aa, Artificial Sequence
  Description of Artificial Sequence: Synthetic peptide
  XENP024282 vlCDR3
FQGSHVPNT

SEQ ID NO: 34927 - protein, 251 aa, Artificial Sequence
  Description of Artificial Sequence: Synthetic polypeptide
  XENP024283 1C11_H3.164_L3_scFv
QIQLVQSGSELKKPGASVKVSCKASGYTFTHYGMNWVRQAPGQGLEWMGWINTYTGEPTYADGFTGRFVFSLDTSVSTAVLQISSLKAEDTAVYFCARDYYGSSPYWGQGTLVTVSSGKPGSGKPGSGKPGSGKPGSDVLMTQSPDSLAVSLGERATINCKSSQSIVHSNGNTYLEWYQQKPGQSPKLLIYKVSNRFSGVPDRFSGSGSGTDFTLTISSLQAEDVAVYYCFQGSHVPNTFGGGTKVEIKGS

SEQ ID NO: 34928 - protein, 117 aa, Artificial Sequence
  Description of Artificial Sequence: Synthetic polypeptide
  VH of XENP024283
QIQLVQSGSELKKPGASVKVSCKASGYTFTHYGMNWVRQAPGQGLEWMGWINTYTGEPTYADGFTGRFVFSLDTSVSTAVLQISSLKAEDTAVYFCARDYYGSSPYWGQGTLVTVSS

SEQ ID NO: 34929 - protein, 114 aa, Artificial Sequence; identical to SEQ ID NO: 33651
  Description of Artificial Sequence: Synthetic polypeptide
  VL of XENP024283

SEQ ID NO: 34930 - protein, 5 aa, Artificial Sequence
  Description of Artificial Sequence: Synthetic peptide
  XENP024283 vhCDR1
HYGMN

SEQ ID NO: 34931 - protein, 17 aa, Artificial Sequence
  Description of Artificial Sequence: Synthetic peptide
  XENP024283 vhCDR2
WINTYTGEPTYADGFTG

SEQ ID NO: 34932 - protein, 8 aa, Artificial Sequence
  Description of Artificial Sequence: Synthetic peptide
  XENP024283 vhCDR3
DYYGSSPY

SEQ ID NO: 34933 - protein, 16 aa, Artificial Sequence
  Description of Artificial Sequence: Synthetic peptide
  XENP024283 vlCDR1
KSSQSIVHSNGNTYLE

SEQ ID NO: 34934 - protein, 7 aa, Artificial Sequence
  Description of Artificial Sequence: Synthetic peptide
  XENP024283 vlCDR2
KVSNRFS

SEQ ID NO: 34935 - protein, 9 aa, Artificial Sequence
  Description of Artificial Sequence: Synthetic peptide
  XENP024283 vlCDR3
FQGSHVPNT

SEQ ID NO: 34936 - protein, 251 aa, Artificial Sequence
  Description of Artificial Sequence: Synthetic polypeptide
  XENP024284 1C11_H3.165_L3_scFv
QIQLVQSGSELKKPGASVKVSCKASGYTFTHYGMNWVRQAPGQGLEWMGWINTYTGEPTYADGFTGRFVFSLDTSVSTASLQISSLKAEDTAVYFCARDYYGSSPYWGQGTLVTVSSGKPGSGKPGSGKPGSGKPGSDVLMTQSPDSLAVSLGERATINCKSSQSIVHSNGNTYLEWYQQKPGQSPKLLIYKVSNRFSGVPDRFSGSGSGTDFTLTISSLQAEDVAVYYCFQGSHVPNTFGGGTKVEIKGS

SEQ ID NO: 34937 - protein, 117 aa, Artificial Sequence
  Description of Artificial Sequence: Synthetic polypeptide
  VH of XENP024284
QIQLVQSGSELKKPGASVKVSCKASGYTFTHYGMNWVRQAPGQGLEWMGWINTYTGEPTYADGFTGRFVFSLDTSVSTASLQISSLKAEDTAVYFCARDYYGSSPYWGQGTLVTVSS

SEQ ID NO: 34938 - protein, 114 aa, Artificial Sequence; identical to SEQ ID NO: 33651
  Description of Artificial Sequence: Synthetic polypeptide
  VL of XENP024284

SEQ ID NO: 34939 - protein, 5 aa, Artificial Sequence
  Description of Artificial Sequence: Synthetic peptide
  XENP024284 vhCDR1
HYGMN

SEQ ID NO: 34940 - protein, 17 aa, Artificial Sequence
  Description of Artificial Sequence: Synthetic peptide
  XENP024284 vhCDR2
WINTYTGEPTYADGFTG

SEQ ID NO: 34941 - protein, 8 aa, Artificial Sequence
  Description of Artificial Sequence: Synthetic peptide
  XENP024284 vhCDR3
DYYGSSPY

SEQ ID NO: 34942 - protein, 16 aa, Artificial Sequence
  Description of Artificial Sequence: Synthetic peptide
  XENP024284 vlCDR1
KSSQSIVHSNGNTYLE

SEQ ID NO: 34943 - protein, 7 aa, Artificial Sequence
  Description of Artificial Sequence: Synthetic peptide
  XENP024284 vlCDR2
KVSNRFS

SEQ ID NO: 34944 - protein, 9 aa, Artificial Sequence
  Description of Artificial Sequence: Synthetic peptide
  XENP024284 vlCDR3
FQGSHVPNT

SEQ ID NO: 34945 - protein, 251 aa, Artificial Sequence
  Description of Artificial Sequence: Synthetic polypeptide
  XENP024285 1C11_H3.166_L3_scFv
QIQLVQSGSELKKPGASVKVSCKASGYTFTHYGMNWVRQAPGQGLEWMGWINTYTGEPTYADGFTGRFVFSLDTSVSTAYLEISSLKAEDTAVYFCARDYYGSSPYWGQGTLVTVSSGKPGSGKPGSGKPGSGKPGSDVLMTQSPDSLAVSLGERATINCKSSQSIVHSNGNTYLEWYQQKPGQSPKLLIYKVSNRFSGVPDRFSGSGSGTDFTLTISSLQAEDVAVYYCFQGSHVPNTFGGGTKVEIKGS

SEQ ID NO: 34946 - protein, 117 aa, Artificial Sequence
  Description of Artificial Sequence: Synthetic polypeptide
  VH of XENP024285
QIQLVQSGSELKKPGASVKVSCKASGYTFTHYGMNWVRQAPGQGLEWMGWINTYTGEPTYADGFTGRFVFSLDTSVSTAYLEISSLKAEDTAVYFCARDYYGSSPYWGQGTLVTVSS

SEQ ID NO: 34947 - protein, 114 aa, Artificial Sequence; identical to SEQ ID NO: 33651
  Description of Artificial Sequence: Synthetic polypeptide
  VL of XENP024285

SEQ ID NO: 34948 - protein, 5 aa, Artificial Sequence
  Description of Artificial Sequence: Synthetic peptide
  XENP024285 vhCDR1
HYGMN

SEQ ID NO: 34949 - protein, 17 aa, Artificial Sequence
  Description of Artificial Sequence: Synthetic peptide
  XENP024285 vhCDR2
WINTYTGEPTYADGFTG

SEQ ID NO: 34950 - protein, 8 aa, Artificial Sequence
  Description of Artificial Sequence: Synthetic peptide
  XENP024285 vhCDR3
DYYGSSPY

SEQ ID NO: 34951 - protein, 16 aa, Artificial Sequence
  Description of Artificial Sequence: Synthetic peptide
  XENP024285 vlCDR1
KSSQSIVHSNGNTYLE

SEQ ID NO: 34952 - protein, 7 aa, Artificial Sequence
  Description of Artificial Sequence: Synthetic peptide
  XENP024285 vlCDR2
KVSNRFS

SEQ ID NO: 34953 - protein, 9 aa, Artificial Sequence
  Description of Artificial Sequence: Synthetic peptide
  XENP024285 vlCDR3
FQGSHVPNT

SEQ ID NO: 34954 - protein, 251 aa, Artificial Sequence
  Description of Artificial Sequence: Synthetic polypeptide
  XENP024286 1C11_H3.167_L3_scFv
QIQLVQSGSELKKPGASVKVSCKASGYTFTHYGMNWVRQAPGQGLEWMGWINTYTGEPTYADGFTGRFVFSLDTSVSTAYLKISSLKAEDTAVYFCARDYYGSSPYWGQGTLVTVSSGKPGSGKPGSGKPGSGKPGSDVLMTQSPDSLAVSLGERATINCKSSQSIVHSNGNTYLEWYQQKPGQSPKLLIYKVSNRFSGVPDRFSGSGSGTDFTLTISSLQAEDVAVYYCFQGSHVPNTFGGGTKVEIKGS

SEQ ID NO: 34955 - protein, 117 aa, Artificial Sequence
  Description of Artificial Sequence: Synthetic polypeptide
  VH of XENP024286
QIQLVQSGSELKKPGASVKVSCKASGYTFTHYGMNWVRQAPGQGLEWMGWINTYTGEPTYADGFTGRFVFSLDTSVSTAYLKISSLKAEDTAVYFCARDYYGSSPYWGQGTLVTVSS

SEQ ID NO: 34956 - protein, 114 aa, Artificial Sequence; identical to SEQ ID NO: 33651
  Description of Artificial Sequence: Synthetic polypeptide
  VL of XENP024286

SEQ ID NO: 34957 - protein, 5 aa, Artificial Sequence
  Description of Artificial Sequence: Synthetic peptide
  XENP024286 vhCDR1
HYGMN

SEQ ID NO: 34958 - protein, 17 aa, Artificial Sequence
  Description of Artificial Sequence: Synthetic peptide
  XENP024286 vhCDR2
WINTYTGEPTYADGFTG

SEQ ID NO: 34959 - protein, 8 aa, Artificial Sequence
  Description of Artificial Sequence: Synthetic peptide
  XENP024286 vhCDR3
DYYGSSPY

SEQ ID NO: 34960 - protein, 16 aa, Artificial Sequence
  Description of Artificial Sequence: Synthetic peptide
  XENP024286 vlCDR1
KSSQSIVHSNGNTYLE

SEQ ID NO: 34961 - protein, 7 aa, Artificial Sequence
  Description of Artificial Sequence: Synthetic peptide
  XENP024286 vlCDR2
KVSNRFS

SEQ ID NO: 34962 - protein, 9 aa, Artificial Sequence
  Description of Artificial Sequence: Synthetic peptide
  XENP024286 vlCDR3
FQGSHVPNT

SEQ ID NO: 34963 - protein, 251 aa, Artificial Sequence
  Description of Artificial Sequence: Synthetic polypeptide
  XENP024287 1C11_H3.168_L3_scFv
QIQLVQSGSELKKPGASVKVSCKASGYTFTHYGMNWVRQAPGQGLEWMGWINTYTGEPTYADGFTGRFVFSLDTSVSTAYLQINSLKAEDTAVYFCARDYYGSSPYWGQGTLVTVSSGKPGSGKPGSGKPGSGKPGSDVLMTQSPDSLAVSLGERATINCKSSQSIVHSNGNTYLEWYQQKPGQSPKLLIYKVSNRFSGVPDRFSGSGSGTDFTLTISSLQAEDVAVYYCFQGSHVPNTFGGGTKVEIKGS

SEQ ID NO: 34964 - protein, 117 aa, Artificial Sequence
  Description of Artificial Sequence: Synthetic polypeptide
  VH of XENP024287
QIQLVQSGSELKKPGASVKVSCKASGYTFTHYGMNWVRQAPGQGLEWMGWINTYTGEPTYADGFTGRFVFSLDTSVSTAYLQINSLKAEDTAVYFCARDYYGSSPYWGQGTLVTVSS

SEQ ID NO: 34965 - protein, 114 aa, Artificial Sequence; identical to SEQ ID NO: 33651
  Description of Artificial Sequence: Synthetic polypeptide
  VL of XENP024287

SEQ ID NO: 34966 - protein, 5 aa, Artificial Sequence
  Description of Artificial Sequence: Synthetic peptide
  XENP024287 vhCDR1
HYGMN

SEQ ID NO: 34967 - protein, 17 aa, Artificial Sequence
  Description of Artificial Sequence: Synthetic peptide
  XENP024287 vhCDR2
WINTYTGEPTYADGFTG

SEQ ID NO: 34968 - protein, 8 aa, Artificial Sequence
  Description of Artificial Sequence: Synthetic peptide
  XENP024287 vhCDR3
DYYGSSPY

SEQ ID NO: 34969 - protein, 16 aa, Artificial Sequence
  Description of Artificial Sequence: Synthetic peptide
  XENP024287 vlCDR1
KSSQSIVHSNGNTYLE

SEQ ID NO: 34970 - protein, 7 aa, Artificial Sequence
  Description of Artificial Sequence: Synthetic peptide
  XENP024287 vlCDR2
KVSNRFS

SEQ ID NO: 34971 - protein, 9 aa, Artificial Sequence
  Description of Artificial Sequence: Synthetic peptide
  XENP024287 vlCDR3
FQGSHVPNT

SEQ ID NO: 34972 - protein, 251 aa, Artificial Sequence
  Description of Artificial Sequence: Synthetic polypeptide
  XENP024288 1C11_H3.169_L3_scFv
QIQLVQSGSELKKPGASVKVSCKASGYTFTHYGMNWVRQAPGQGLEWMGWINTYTGEPTYADGFTGRFVFSLDTSVSTAYLQISSVKAEDTAVYFCARDYYGSSPYWGQGTLVTVSSGKPGSGKPGSGKPGSGKPGSDVLMTQSPDSLAVSLGERATINCKSSQSIVHSNGNTYLEWYQQKPGQSPKLLIYKVSNRFSGVPDRFSGSGSGTDFTLTISSLQAEDVAVYYCFQGSHVPNTFGGGTKVEIKGS

SEQ ID NO: 34973 - protein, 117 aa, Artificial Sequence
  Description of Artificial Sequence: Synthetic polypeptide
  VH of XENP024288
QIQLVQSGSELKKPGASVKVSCKASGYTFTHYGMNWVRQAPGQGLEWMGWINTYTGEPTYADGFTGRFVFSLDTSVSTAYLQISSVKAEDTAVYFCARDYYGSSPYWGQGTLVTVSS

SEQ ID NO: 34974 - protein, 114 aa, Artificial Sequence; identical to SEQ ID NO: 33651
  Description of Artificial Sequence: Synthetic polypeptide
  VL of XENP024288

SEQ ID NO: 34975 - protein, 5 aa, Artificial Sequence
  Description of Artificial Sequence: Synthetic peptide
  XENP024288 vhCDR1
HYGMN

SEQ ID NO: 34976 - protein, 17 aa, Artificial Sequence
  Description of Artificial Sequence: Synthetic peptide
  XENP024288 vhCDR2
WINTYTGEPTYADGFTG

SEQ ID NO: 34977 - protein, 8 aa, Artificial Sequence
  Description of Artificial Sequence: Synthetic peptide
  XENP024288 vhCDR3
DYYGSSPY

SEQ ID NO: 34978 - protein, 16 aa, Artificial Sequence
  Description of Artificial Sequence: Synthetic peptide
  XENP024288 vlCDR1
KSSQSIVHSNGNTYLE

SEQ ID NO: 34979 - protein, 7 aa, Artificial Sequence
  Description of Artificial Sequence: Synthetic peptide
  XENP024288 vlCDR2
KVSNRFS

SEQ ID NO: 34980 - protein, 9 aa, Artificial Sequence
  Description of Artificial Sequence: Synthetic peptide
  XENP024288 vlCDR3
FQGSHVPNT

SEQ ID NO: 34981 - protein, 251 aa, Artificial Sequence
  Description of Artificial Sequence: Synthetic polypeptide
  XENP024289 1C11_H3.170_L3_scFv
QIQLVQSGSELKKPGASVKVSCKASGYTFTHYGMNWVRQAPGQGLEWMGWINTYTGEPTYADGFTGRFVFSLDTSVSTAYLQISSMKAEDTAVYFCARDYYGSSPYWGQGTLVTVSSGKPGSGKPGSGKPGSGKPGSDVLMTQSPDSLAVSLGERATINCKSSQSIVHSNGNTYLEWYQQKPGQSPKLLIYKVSNRFSGVPDRFSGSGSGTDFTLTISSLQAEDVAVYYCFQGSHVPNTFGGGTKVEIKGS

SEQ ID NO: 34982 - protein, 117 aa, Artificial Sequence
  Description of Artificial Sequence: Synthetic polypeptide
  VH of XENP024289
QIQLVQSGSELKKPGASVKVSCKASGYTFTHYGMNWVRQAPGQGLEWMGWINTYTGEPTYADGFTGRFVFSLDTSVSTAYLQISSMKAEDTAVYFCARDYYGSSPYWGQGTLVTVSS

SEQ ID NO: 34983 - protein, 114 aa, Artificial Sequence; identical to SEQ ID NO: 33651
  Description of Artificial Sequence: Synthetic polypeptide
  VL of XENP024289

SEQ ID NO: 34984 - protein, 5 aa, Artificial Sequence
  Description of Artificial Sequence: Synthetic peptide
  XENP024289 vhCDR1
HYGMN

SEQ ID NO: 34985 - protein, 17 aa, Artificial Sequence
  Description of Artificial Sequence: Synthetic peptide
  XENP024289 vhCDR2
WINTYTGEPTYADGFTG

SEQ ID NO: 34986 - protein, 8 aa, Artificial Sequence
  Description of Artificial Sequence: Synthetic peptide
  XENP024289 vhCDR3
DYYGSSPY

SEQ ID NO: 34987 - protein, 16 aa, Artificial Sequence
  Description of Artificial Sequence: Synthetic peptide
  XENP024289 vlCDR1
KSSQSIVHSNGNTYLE

SEQ ID NO: 34988 - protein, 7 aa, Artificial Sequence
  Description of Artificial Sequence: Synthetic peptide
  XENP024289 vlCDR2
KVSNRFS

SEQ ID NO: 34989 - protein, 9 aa, Artificial Sequence
  Description of Artificial Sequence: Synthetic peptide
  XENP024289 vlCDR3
FQGSHVPNT

SEQ ID NO: 34990 - protein, 251 aa, Artificial Sequence
  Description of Artificial Sequence: Synthetic polypeptide
  XENP024290 1C11_H3.171_L3_scFv
QIQLVQSGSELKKPGASVKVSCKASGYTFTHYGMNWVRQAPGQGLEWMGWINTYTGEPTYADGFTGRFVFSLDTSVSTAYLQISSLKSEDTAVYFCARDYYGSSPYWGQGTLVTVSSGKPGSGKPGSGKPGSGKPGSDVLMTQSPDSLAVSLGERATINCKSSQSIVHSNGNTYLEWYQQKPGQSPKLLIYKVSNRFSGVPDRFSGSGSGTDFTLTISSLQAEDVAVYYCFQGSHVPNTFGGGTKVEIKGS

SEQ ID NO: 34991 - protein, 117 aa, Artificial Sequence
  Description of Artificial Sequence: Synthetic polypeptide
  VH of XENP024290
QIQLVQSGSELKKPGASVKVSCKASGYTFTHYGMNWVRQAPGQGLEWMGWINTYTGEPTYADGFTGRFVFSLDTSVSTAYLQISSLKSEDTAVYFCARDYYGSSPYWGQGTLVTVSS

SEQ ID NO: 34992 - protein, 114 aa, Artificial Sequence; identical to SEQ ID NO: 33651
  Description of Artificial Sequence: Synthetic polypeptide
  VL of XENP024290

SEQ ID NO: 34993 - protein, 5 aa, Artificial Sequence
  Description of Artificial Sequence: Synthetic peptide
  XENP024290 vhCDR1
HYGMN

SEQ ID NO: 34994 - protein, 17 aa, Artificial Sequence
  Description of Artificial Sequence: Synthetic peptide
  XENP024290 vhCDR2
WINTYTGEPTYADGFTG

SEQ ID NO: 34995 - protein, 8 aa, Artificial Sequence
  Description of Artificial Sequence: Synthetic peptide
  XENP024290 vhCDR3
DYYGSSPY

SEQ ID NO: 34996 - protein, 16 aa, Artificial Sequence
  Description of Artificial Sequence: Synthetic peptide
  XENP024290 vlCDR1
KSSQSIVHSNGNTYLE

SEQ ID NO: 34997 - protein, 7 aa, Artificial Sequence
  Description of Artificial Sequence: Synthetic peptide
  XENP024290 vlCDR2
KVSNRFS

SEQ ID NO: 34998 - protein, 9 aa, Artificial Sequence
  Description of Artificial Sequence: Synthetic peptide
  XENP024290 vlCDR3
FQGSHVPNT

SEQ ID NO: 34999 - protein, 251 aa, Artificial Sequence
  Description of Artificial Sequence: Synthetic polypeptide
  XENP024291 1C11_H3.172_L3_scFv
QIQLVQSGSELKKPGASVKVSCKASGYTFTHYGMNWVRQAPGQGLEWMGWINTYTGEPTYADGFTGRFVFSLDTSVSTAYLQISSLKPEDTAVYFCARDYYGSSPYWGQGTLVTVSSGKPGSGKPGSGKPGSGKPGSDVLMTQSPDSLAVSLGERATINCKSSQSIVHSNGNTYLEWYQQKPGQSPKLLIYKVSNRFSGVPDRFSGSGSGTDFTLTISSLQAEDVAVYYCFQGSHVPNTFGGGTKVEIKGS

SEQ ID NO: 35000 - protein, 117 aa, Artificial Sequence
  Description of Artificial Sequence: Synthetic polypeptide
  VH of XENP024291
QIQLVQSGSELKKPGASVKVSCKASGYTFTHYGMNWVRQAPGQGLEWMGWINTYTGEPTYADGFTGRFVFSLDTSVSTAYLQISSLKPEDTAVYFCARDYYGSSPYWGQGTLVTVSS

SEQ ID NO: 35001 - protein, 114 aa, Artificial Sequence; identical to SEQ ID NO: 33651
  Description of Artificial Sequence: Synthetic polypeptide
  VL of XENP024291

SEQ ID NO: 35002 - protein, 5 aa, Artificial Sequence
  Description of Artificial Sequence: Synthetic peptide
  XENP024291 vhCDR1
HYGMN

SEQ ID NO: 35003 - protein, 17 aa, Artificial Sequence
  Description of Artificial Sequence: Synthetic peptide
  XENP024291 vhCDR2
WINTYTGEPTYADGFTG

SEQ ID NO: 35004 - protein, 8 aa, Artificial Sequence
  Description of Artificial Sequence: Synthetic peptide
  XENP024291 vhCDR3
DYYGSSPY

SEQ ID NO: 35005 - protein, 16 aa, Artificial Sequence
  Description of Artificial Sequence: Synthetic peptide
  XENP024291 vlCDR1
KSSQSIVHSNGNTYLE

SEQ ID NO: 35006 - protein, 7 aa, Artificial Sequence
  Description of Artificial Sequence: Synthetic peptide
  XENP024291 vlCDR2
KVSNRFS

SEQ ID NO: 35007 - protein, 9 aa, Artificial Sequence
  Description of Artificial Sequence: Synthetic peptide
  XENP024291 vlCDR3
FQGSHVPNT

SEQ ID NO: 35008 - protein, 251 aa, Artificial Sequence
  Description of Artificial Sequence: Synthetic polypeptide
  XENP024292 1C11_H3.173_L3_scFv
QIQLVQSGSELKKPGASVKVSCKASGYTFTHYGMNWVRQAPGQGLEWMGWINTYTGEPTYADGFTGRFVFSLDTSVSTAYLQISSLKADDTAVYFCARDYYGSSPYWGQGTLVTVSSGKPGSGKPGSGKPGSGKPGSDVLMTQSPDSLAVSLGERATINCKSSQSIVHSNGNTYLEWYQQKPGQSPKLLIYKVSNRFSGVPDRFSGSGSGTDFTLTISSLQAEDVAVYYCFQGSHVPNTFGGGTKVEIKGS

SEQ ID NO: 35009 - protein, 117 aa, Artificial Sequence
  Description of Artificial Sequence: Synthetic polypeptide
  VH of XENP024292
QIQLVQSGSELKKPGASVKVSCKASGYTFTHYGMNWVRQAPGQGLEWMGWINTYTGEPTYADGFTGRFVFSLDTSVSTAYLQISSLKADDTAVYFCARDYYGSSPYWGQGTLVTVSS

SEQ ID NO: 35010 - protein, 114 aa, Artificial Sequence; identical to SEQ ID NO: 33651
  Description of Artificial Sequence: Synthetic polypeptide
  VL of XENP024292

SEQ ID NO: 35011 - protein, 5 aa, Artificial Sequence
  Description of Artificial Sequence: Synthetic peptide
  XENP024292 vhCDR1
HYGMN

SEQ ID NO: 35012 - protein, 17 aa, Artificial Sequence
  Description of Artificial Sequence: Synthetic peptide
  XENP024292 vhCDR2
WINTYTGEPTYADGFTG

SEQ ID NO: 35013 - protein, 8 aa, Artificial Sequence
  Description of Artificial Sequence: Synthetic peptide
  XENP024292 vhCDR3
DYYGSSPY

SEQ ID NO: 35014 - protein, 16 aa, Artificial Sequence
  Description of Artificial Sequence: Synthetic peptide
  XENP024292 vlCDR1
KSSQSIVHSNGNTYLE

SEQ ID NO: 35015 - protein, 7 aa, Artificial Sequence
  Description of Artificial Sequence: Synthetic peptide
  XENP024292 vlCDR2
KVSNRFS

SEQ ID NO: 35016 - protein, 9 aa, Artificial Sequence
  Description of Artificial Sequence: Synthetic peptide
  XENP024292 vlCDR3
FQGSHVPNT

SEQ ID NO: 35017 - protein, 251 aa, Artificial Sequence
  Description of Artificial Sequence: Synthetic polypeptide
  XENP024293 1C11_H3.174_L3_scFv
QIQLVQSGSELKKPGASVKVSCKASGYTFTHYGMNWVRQAPGQGLEWMGWINTYTGEPTYADGFTGRFVFSLDTSVSTAYLQISSLKAADTAVYFCARDYYGSSPYWGQGTLVTVSSGKPGSGKPGSGKPGSGKPGSDVLMTQSPDSLAVSLGERATINCKSSQSIVHSNGNTYLEWYQQKPGQSPKLLIYKVSNRFSGVPDRFSGSGSGTDFTLTISSLQAEDVAVYYCFQGSHVPNTFGGGTKVEIKGS

SEQ ID NO: 35018 - protein, 117 aa, Artificial Sequence
  Description of Artificial Sequence: Synthetic polypeptide
  VH of XENP024293
QIQLVQSGSELKKPGASVKVSCKASGYTFTHYGMNWVRQAPGQGLEWMGWINTYTGEPTYADGFTGRFVFSLDTSVSTAYLQISSLKAADTAVYFCARDYYGSSPYWGQGTLVTVSS

SEQ ID NO: 35019 - protein, 114 aa, Artificial Sequence; identical to SEQ ID NO: 33651
  Description of Artificial Sequence: Synthetic polypeptide
  VL of XENP024293

SEQ ID NO: 35020 - protein, 5 aa, Artificial Sequence
  Description of Artificial Sequence: Synthetic peptide
  XENP024293 vhCDR1
HYGMN

SEQ ID NO: 35021 - protein, 17 aa, Artificial Sequence
  Description of Artificial Sequence: Synthetic peptide
  XENP024293 vhCDR2
WINTYTGEPTYADGFTG

SEQ ID NO: 35022 - protein, 8 aa, Artificial Sequence
  Description of Artificial Sequence: Synthetic peptide
  XENP024293 vhCDR3
DYYGSSPY

SEQ ID NO: 35023 - protein, 16 aa, Artificial Sequence
  Description of Artificial Sequence: Synthetic peptide
  XENP024293 vlCDR1
KSSQSIVHSNGNTYLE

SEQ ID NO: 35024 - protein, 7 aa, Artificial Sequence
  Description of Artificial Sequence: Synthetic peptide
  XENP024293 vlCDR2
KVSNRFS

SEQ ID NO: 35025 - protein, 9 aa, Artificial Sequence
  Description of Artificial Sequence: Synthetic peptide
  XENP024293 vlCDR3
FQGSHVPNT

SEQ ID NO: 35026 - protein, 251 aa, Artificial Sequence
  Description of Artificial Sequence: Synthetic polypeptide
  XENP024372 1C11_H3_L3.86_scFv
QIQLVQSGSELKKPGASVKVSCKASGYTFTHYGMNWVRQAPGQGLEWMGWINTYTGEPTYADGFTGRFVFSLDTSVSTAYLQISSLKAEDTAVYFCARDYYGSSPYWGQGTLVTVSSGKPGSGKPGSGKPGSGKPGSDVLMTQSPDSLAVSLGERATINCKSSQSIVHSNGNTYLEWYQQKPGQSPKLLIYKVSNRFTGVPDRFSGSGSGTDFTLTISSVQAEDVATYYCFQGSHVPNTFGQGTKVEIKGS

SEQ ID NO: 35027 - protein, 117 aa, Artificial Sequence; identical to SEQ ID NO: 33034
  Description of Artificial Sequence: Synthetic polypeptide
  VH of XENP024372

SEQ ID NO: 35028 - protein, 114 aa, Artificial Sequence
  Description of Artificial Sequence: Synthetic polypeptide
  VL of XENP024372
DVLMTQSPDSLAVSLGERATINCKSSQSIVHSNGNTYLEWYQQKPGQSPKLLIYKVSNRFTGVPDRFSGSGSGTDFTLTISSVQAEDVATYYCFQGSHVPNTFGQGTKVEIKGS

SEQ ID NO: 35029 - protein, 5 aa, Artificial Sequence
  Description of Artificial Sequence: Synthetic peptide
  XENP024372 vhCDR1
HYGMN

SEQ ID NO: 35030 - protein, 17 aa, Artificial Sequence
  Description of Artificial Sequence: Synthetic peptide
  XENP024372 vhCDR2
WINTYTGEPTYADGFTG

SEQ ID NO: 35031 - protein, 8 aa, Artificial Sequence
  Description of Artificial Sequence: Synthetic peptide
  XENP024372 vhCDR3
DYYGSSPY

SEQ ID NO: 35032 - protein, 16 aa, Artificial Sequence
  Description of Artificial Sequence: Synthetic peptide
  XENP024372 vlCDR1
KSSQSIVHSNGNTYLE

SEQ ID NO: 35033 - protein, 7 aa, Artificial Sequence
  Description of Artificial Sequence: Synthetic peptide
  XENP024372 vlCDR2
KVSNRFT

SEQ ID NO: 35034 - protein, 9 aa, Artificial Sequence
  Description of Artificial Sequence: Synthetic peptide
  XENP024372 vlCDR3
FQGSHVPNT

SEQ ID NO: 35035 - protein, 251 aa, Artificial Sequence
  Description of Artificial Sequence: Synthetic polypeptide
  XENP024373 1C11_H3_L3.87_scFv
QIQLVQSGSELKKPGASVKVSCKASGYTFTHYGMNWVRQAPGQGLEWMGWINTYTGEPTYADGFTGRFVFSLDTSVSTAYLQISSLKAEDTAVYFCARDYYGSSPYWGQGTLVTVSSGKPGSGKPGSGKPGSGKPGSDVVMTQSPDSLAVSLGERVTINCKASQSIVHSNGNTYLEWYQQKPGQPPKLLIYKVSNRFSGVPDRFSGSGSGTDFTLTISSLQAEDVAVYYCFQGSHVPNTFGGGTKVEIKGS

SEQ ID NO: 35036 - protein, 117 aa, Artificial Sequence; identical to SEQ ID NO: 33034
  Description of Artificial Sequence: Synthetic polypeptide
  VH of XENP024373

SEQ ID NO: 35037 - protein, 114 aa, Artificial Sequence
  Description of Artificial Sequence: Synthetic polypeptide
  VL of XENP024373
DVVMTQSPDSLAVSLGERVTINCKASQSIVHSNGNTYLEWYQQKPGQPPKLLIYKVSNRFSGVPDRFSGSGSGTDFTLTISSLQAEDVAVYYCFQGSHVPNTFGGGTKVEIKGS

SEQ ID NO: 35038 - protein, 5 aa, Artificial Sequence
  Description of Artificial Sequence: Synthetic peptide
  XENP024373 vhCDR1
HYGMN

SEQ ID NO: 35039 - protein, 17 aa, Artificial Sequence
  Description of Artificial Sequence: Synthetic peptide
  XENP024373 vhCDR2
WINTYTGEPTYADGFTG

SEQ ID NO: 35040 - protein, 8 aa, Artificial Sequence
  Description of Artificial Sequence: Synthetic peptide
  XENP024373 vhCDR3
DYYGSSPY

SEQ ID NO: 35041 - protein, 16 aa, Artificial Sequence
  Description of Artificial Sequence: Synthetic peptide
  XENP024373 vlCDR1
KASQSIVHSNGNTYLE

SEQ ID NO: 35042 - protein, 7 aa, Artificial Sequence
  Description of Artificial Sequence: Synthetic peptide
  XENP024373 vlCDR2
KVSNRFS

SEQ ID NO: 35043 - protein, 9 aa, Artificial Sequence
  Description of Artificial Sequence: Synthetic peptide
  XENP024373 vlCDR3
FQGSHVPNT

SEQ ID NO: 35044 - protein, 251 aa, Artificial Sequence
  Description of Artificial Sequence: Synthetic polypeptide
  XENP024374 1C11_H3_L3.90_scFv
QIQLVQSGSELKKPGASVKVSCKASGYTFTHYGMNWVRQAPGQGLEWMGWINTYTGEPTYADGFTGRFVFSLDTSVSTAYLQISSLKAEDTAVYFCARDYYGSSPYWGQGTLVTVSSGKPGSGKPGSGKPGSGKPGSDVVMTQSPDSLAVSLGERATINCKASQSIVHSNGNTYLEWYQQKPGQPPKLLIYKVSNRFSGVPDRFSGSGSGTDFTLTISSVQAEDAATYYCFQGSHVPNTFGQGTKVEIKGS

SEQ ID NO: 35045 - protein, 117 aa, Artificial Sequence; identical to SEQ ID NO: 33034
  Description of Artificial Sequence: Synthetic polypeptide
  VH of XENP024374

SEQ ID NO: 35046 - protein, 114 aa, Artificial Sequence
  Description of Artificial Sequence: Synthetic polypeptide
  VL of XENP024374
DVVMTQSPDSLAVSLGERATINCKASQSIVHSNGNTYLEWYQQKPGQPPKLLIYKVSNRFSGVPDRFSGSGSGTDFTLTISSVQAEDAATYYCFQGSHVPNTFGQGTKVEIKGS

SEQ ID NO: 35047 - protein, 5 aa, Artificial Sequence
  Description of Artificial Sequence: Synthetic peptide
  XENP024374 vhCDR1
HYGMN

SEQ ID NO: 35048 - protein, 17 aa, Artificial Sequence
  Description of Artificial Sequence: Synthetic peptide
  XENP024374 vhCDR2
WINTYTGEPTYADGFTG

SEQ ID NO: 35049 - protein, 8 aa, Artificial Sequence
  Description of Artificial Sequence: Synthetic peptide
  XENP024374 vhCDR3
DYYGSSPY

SEQ ID NO: 35050 - protein, 16 aa, Artificial Sequence
  Description of Artificial Sequence: Synthetic peptide
  XENP024374 vlCDR1
KASQSIVHSNGNTYLE

SEQ ID NO: 35051 - protein, 7 aa, Artificial Sequence
  Description of Artificial Sequence: Synthetic peptide
  XENP024374 vlCDR2
KVSNRFS

SEQ ID NO: 35052 - protein, 9 aa, Artificial Sequence
  Description of Artificial Sequence: Synthetic peptide
  XENP024374 vlCDR3
FQGSHVPNT

SEQ ID NO: 35053 - protein, 251 aa, Artificial Sequence
  Description of Artificial Sequence: Synthetic polypeptide
  XENP024375 1C11_H3_L3.92_scFv
QIQLVQSGSELKKPGASVKVSCKASGYTFTHYGMNWVRQAPGQGLEWMGWINTYTGEPTYADGFTGRFVFSLDTSVSTAYLQISSLKAEDTAVYFCARDYYGSSPYWGQGTLVTVSSGKPGSGKPGSGKPGSGKPGSDIVMTQSPDSLAVSLGERVTINCKASQSIVHSNGNTYLEWYQQKPGQPPKLLIYKVSNRFTGVPDRFSGSGSGTDFTLTISSLQAEDVAVYYCFQGSHVPNTFGGGTKVEIKGS

SEQ ID NO: 35054 - protein, 117 aa, Artificial Sequence; identical to SEQ ID NO: 33034
  Description of Artificial Sequence: Synthetic polypeptide
  VH of XENP024375

SEQ ID NO: 35055 - protein, 114 aa, Artificial Sequence
  Description of Artificial Sequence: Synthetic polypeptide
  VL of XENP024375
DIVMTQSPDSLAVSLGERVTINCKASQSIVHSNGNTYLEWYQQKPGQPPKLLIYKVSNRFTGVPDRFSGSGSGTDFTLTISSLQAEDVAVYYCFQGSHVPNTFGGGTKVEIKGS

SEQ ID NO: 35056 - protein, 5 aa, Artificial Sequence
  Description of Artificial Sequence: Synthetic peptide
  XENP024375 vhCDR1
HYGMN

SEQ ID NO: 35057 - protein, 17 aa, Artificial Sequence
  Description of Artificial Sequence: Synthetic peptide
  XENP024375 vhCDR2
WINTYTGEPTYADGFTG

SEQ ID NO: 35058 - protein, 8 aa, Artificial Sequence
  Description of Artificial Sequence: Synthetic peptide
  XENP024375 vhCDR3
DYYGSSPY

SEQ ID NO: 35059 - protein, 16 aa, Artificial Sequence
  Description of Artificial Sequence: Synthetic peptide
  XENP024375 vlCDR1
KASQSIVHSNGNTYLE

SEQ ID NO: 35060 - protein, 7 aa, Artificial Sequence
  Description of Artificial Sequence: Synthetic peptide
  XENP024375 vlCDR2
KVSNRFT

SEQ ID NO: 35061 - protein, 9 aa, Artificial Sequence
  Description of Artificial Sequence: Synthetic peptide
  XENP024375 vlCDR3
FQGSHVPNT

SEQ ID NO: 35062 - protein, 251 aa, Artificial Sequence
  Description of Artificial Sequence: Synthetic polypeptide
  XENP024376 1C11_H3_L3.94_scFv
QIQLVQSGSELKKPGASVKVSCKASGYTFTHYGMNWVRQAPGQGLEWMGWINTYTGEPTYADGFTGRFVFSLDTSVSTAYLQISSLKAEDTAVYFCARDYYGSSPYWGQGTLVTVSSGKPGSGKPGSGKPGSGKPGSDILMTQSPDSLAVSLGERATINCKSSQSIVHSNGNTYLEWYQQKPGQSPKLLIYKVSNRFTGVPDRFSGSGSGTDFTLTISSVQAEDAATYYCFQGSHVPNTFGQGTKVEIKGS

SEQ ID NO: 35063 - protein, 117 aa, Artificial Sequence; identical to SEQ ID NO: 33034
  Description of Artificial Sequence: Synthetic polypeptide
  VH of XENP024376

SEQ ID NO: 35064 - protein, 114 aa, Artificial Sequence
  Description of Artificial Sequence: Synthetic polypeptide
  VL of XENP024376
DILMTQSPDSLAVSLGERATINCKSSQSIVHSNGNTYLEWYQQKPGQSPKLLIYKVSNRFTGVPDRFSGSGSGTDFTLTISSVQAEDAATYYCFQGSHVPNTFGQGTKVEIKGS

SEQ ID NO: 35065 - protein, 5 aa, Artificial Sequence
  Description of Artificial Sequence: Synthetic peptide
  XENP024376 vhCDR1
HYGMN

SEQ ID NO: 35066 - protein, 17 aa, Artificial Sequence
  Description of Artificial Sequence: Synthetic peptide
  XENP024376 vhCDR2
WINTYTGEPTYADGFTG

SEQ ID NO: 35067 - protein, 8 aa, Artificial Sequence
  Description of Artificial Sequence: Synthetic peptide
  XENP024376 vhCDR3
DYYGSSPY

SEQ ID NO: 35068 - protein, 16 aa, Artificial Sequence
  Description of Artificial Sequence: Synthetic peptide
  XENP024376 vlCDR1
KSSQSIVHSNGNTYLE

SEQ ID NO: 35069 - protein, 7 aa, Artificial Sequence
  Description of Artificial Sequence: Synthetic peptide
  XENP024376 vlCDR2
KVSNRFT

SEQ ID NO: 35070 - protein, 9 aa, Artificial Sequence
  Description of Artificial Sequence: Synthetic peptide
  XENP024376 vlCDR3
FQGSHVPNT

SEQ ID NO: 35071 - protein, 251 aa, Artificial Sequence
  Description of Artificial Sequence: Synthetic polypeptide
  XENP024377 1C11_H3_L3.96_scFv
QIQLVQSGSELKKPGASVKVSCKASGYTFTHYGMNWVRQAPGQGLEWMGWINTYTGEPTYADGFTGRFVFSLDTSVSTAYLQISSLKAEDTAVYFCARDYYGSSPYWGQGTLVTVSSGKPGSGKPGSGKPGSGKPGSDIVMTQSPDSLAVSLGERATINCKASQSIVHSNGNTYLEWYQQKPGQPPKLLIYKVSNRFTGVPDRFSGSGSGTDFTLTISSVQAEDAATYYCFQGSHVPNTFGQGTKVEIKGS

SEQ ID NO: 35072 - protein, 117 aa, Artificial Sequence; identical to SEQ ID NO: 33034
  Description of Artificial Sequence: Synthetic polypeptide
  VH of XENP024377

SEQ ID NO: 35073 - protein, 114 aa, Artificial Sequence
  Description of Artificial Sequence: Synthetic polypeptide
  VL of XENP024377
DIVMTQSPDSLAVSLGERATINCKASQSIVHSNGNTYLEWYQQKPGQPPKLLIYKVSNRFTGVPDRFSGSGSGTDFTLTISSVQAEDAATYYCFQGSHVPNTFGQGTKVEIKGS

SEQ ID NO: 35074 - protein, 5 aa, Artificial Sequence
  Description of Artificial Sequence: Synthetic peptide
  XENP024377 vhCDR1
HYGMN

SEQ ID NO: 35075 - protein, 17 aa, Artificial Sequence
  Description of Artificial Sequence: Synthetic peptide
  XENP024377 vhCDR2
WINTYTGEPTYADGFTG

SEQ ID NO: 35076 - protein, 8 aa, Artificial Sequence
  Description of Artificial Sequence: Synthetic peptide
  XENP024377 vhCDR3
DYYGSSPY

SEQ ID NO: 35077 - protein, 16 aa, Artificial Sequence
  Description of Artificial Sequence: Synthetic peptide
  XENP024377 vlCDR1
KASQSIVHSNGNTYLE

SEQ ID NO: 35078 - protein, 7 aa, Artificial Sequence
  Description of Artificial Sequence: Synthetic peptide
  XENP024377 vlCDR2
KVSNRFT

SEQ ID NO: 35079 - protein, 9 aa, Artificial Sequence
  Description of Artificial Sequence: Synthetic peptide
  XENP024377 vlCDR3
FQGSHVPNT

SEQ ID NO: 35080 - protein, 251 aa, Artificial Sequence
  Description of Artificial Sequence: Synthetic polypeptide
  XENP024378 1C11_H3_L3.105_scFv
QIQLVQSGSELKKPGASVKVSCKASGYTFTHYGMNWVRQAPGQGLEWMGWINTYTGEPTYADGFTGRFVFSLDTSVSTAYLQISSLKAEDTAVYFCARDYYGSSPYWGQGTLVTVSSGKPGSGKPGSGKPGSGKPGSDVLMTQSPDSLPVTPGEPATINCKSSQSIVHSNGNTYLEWYQQKPGQSPKLLIYKVSNRFSGVPDRFSGSGSGTDFTLTISSLQAEDVAVYYCFQGSHVPNTFGGGTKVEIKGS

SEQ ID NO: 35081 - protein, 117 aa, Artificial Sequence; identical to SEQ ID NO: 33034
  Description of Artificial Sequence: Synthetic polypeptide
  VH of XENP024378

SEQ ID NO: 35082 - protein, 114 aa, Artificial Sequence
  Description of Artificial Sequence: Synthetic polypeptide
  VL of XENP024378
DVLMTQSPDSLPVTPGEPATINCKSSQSIVHSNGNTYLEWYQQKPGQSPKLLIYKVSNRFSGVPDRFSGSGSGTDFTLTISSLQAEDVAVYYCFQGSHVPNTFGGGTKVEIKGS

SEQ ID NO: 35083 - protein, 5 aa, Artificial Sequence
  Description of Artificial Sequence: Synthetic peptide
  XENP024378 vhCDR1
HYGMN

SEQ ID NO: 35084 - protein, 17 aa, Artificial Sequence
  Description of Artificial Sequence: Synthetic peptide
  XENP024378 vhCDR2
WINTYTGEPTYADGFTG

SEQ ID NO: 35085 - protein, 8 aa, Artificial Sequence
  Description of Artificial Sequence: Synthetic peptide
  XENP024378 vhCDR3
DYYGSSPY

SEQ ID NO: 35086 - protein, 16 aa, Artificial Sequence
  Description of Artificial Sequence: Synthetic peptide
  XENP024378 vlCDR1
KSSQSIVHSNGNTYLE

SEQ ID NO: 35087 - protein, 7 aa, Artificial Sequence
  Description of Artificial Sequence: Synthetic peptide
  XENP024378 vlCDR2
KVSNRFS

SEQ ID NO: 35088 - protein, 9 aa, Artificial Sequence
  Description of Artificial Sequence: Synthetic peptide
  XENP024378 vlCDR3
FQGSHVPNT

SEQ ID NO: 35089 - protein, 251 aa, Artificial Sequence
  Description of Artificial Sequence: Synthetic polypeptide
  XENP024379 1C11_H3_L3.129_scFv
QIQLVQSGSELKKPGASVKVSCKASGYTFTHYGMNWVRQAPGQGLEWMGWINTYTGEPTYADGFTGRFVFSLDTSVSTAYLQISSLKAEDTAVYFCARDYYGSSPYWGQGTLVTVSSGKPGSGKPGSGKPGSGKPGSDVLMTQSPDSLAVSLGERATINCKSSQSIVHSNGNTYLEWYQQKPGQSPKLLIYKVSNRFSGVPDRFSGSGSGTDFTLTINSLQAEDAATYYCHQGSHVPNTFGGGTKVEIKGS

SEQ ID NO: 35090 - protein, 117 aa, Artificial Sequence; identical to SEQ ID NO: 33034
  Description of Artificial Sequence: Synthetic polypeptide
  VH of XENP024379

SEQ ID NO: 35091 - protein, 114 aa, Artificial Sequence
  Description of Artificial Sequence: Synthetic polypeptide
  VL of XENP024379
DVLMTQSPDSLAVSLGERATINCKSSQSIVHSNGNTYLEWYQQKPGQSPKLLIYKVSNRFSGVPDRFSGSGSGTDFTLTINSLQAEDAATYYCHQGSHVPNTFGGGTKVEIKGS

SEQ ID NO: 35092 - protein, 5 aa, Artificial Sequence
  Description of Artificial Sequence: Synthetic peptide
  XENP024379 vhCDR1
HYGMN

SEQ ID NO: 35093 - protein, 17 aa, Artificial Sequence
  Description of Artificial Sequence: Synthetic peptide
  XENP024379 vhCDR2
WINTYTGEPTYADGFTG

SEQ ID NO: 35094 - protein, 8 aa, Artificial Sequence
  Description of Artificial Sequence: Synthetic peptide
  XENP024379 vhCDR3
DYYGSSPY

SEQ ID NO: 35095 - protein, 16 aa, Artificial Sequence
  Description of Artificial Sequence: Synthetic peptide
  XENP024379 vlCDR1
KSSQSIVHSNGNTYLE

SEQ ID NO: 35096 - protein, 7 aa, Artificial Sequence
  Description of Artificial Sequence: Synthetic peptide
  XENP024379 vlCDR2
KVSNRFS

SEQ ID NO: 35097 - protein, 9 aa, Artificial Sequence
  Description of Artificial Sequence: Synthetic peptide
  XENP024379 vlCDR3
HQGSHVPNT

SEQ ID NO: 35098 - protein, 251 aa, Artificial Sequence
  Description of Artificial Sequence: Synthetic polypeptide
  XENP024380 1C11_H3.176_L3.92_scFv
QIQLVQSGPELKKPGASVKVSCKASGYTFTHYGMNWVKQAPGQGLEWMGWINTNTGEPTYADKFTGRVVFSLDTSQSTIYLQISSLKAEDTAVYYCARDYYGSSPYWGQGTLVTVSSGKPGSGKPGSGKPGSGKPGSDIVMTQSPDSLAVSLGERVTINCKASQSIVHSNGNTYLEWYQQKPGQPPKLLIYKVSNRFTGVPDRFSGSGSGTDFTLTISSLQAEDVAVYYCFQGSHVPNTFGGGTKVEIKGS

SEQ ID NO: 35099 - protein, 117 aa, Artificial Sequence
  Description of Artificial Sequence: Synthetic polypeptide
  VH of XENP024380
QIQLVQSGPELKKPGASVKVSCKASGYTFTHYGMNWVKQAPGQGLEWMGWINTNTGEPTYADKFTGRVVFSLDTSQSTIYLQISSLKAEDTAVYYCARDYYGSSPYWGQGTLVTVSS

SEQ ID NO: 35100 - protein, 114 aa, Artificial Sequence; identical to SEQ ID NO: 35055
  Description of Artificial Sequence: Synthetic polypeptide
  VL of XENP024380

SEQ ID NO: 35101 - protein, 5 aa, Artificial Sequence
  Description of Artificial Sequence: Synthetic peptide
  XENP024380 vhCDR1
HYGMN

SEQ ID NO: 35102 - protein, 17 aa, Artificial Sequence
  Description of Artificial Sequence: Synthetic peptide
  XENP024380 vhCDR2
WINTNTGEPTYADKFTG

SEQ ID NO: 35103 - protein, 8 aa, Artificial Sequence
  Description of Artificial Sequence: Synthetic peptide
  XENP024380 vhCDR3
DYYGSSPY

SEQ ID NO: 35104 - protein, 16 aa, Artificial Sequence
  Description of Artificial Sequence: Synthetic peptide
  XENP024380 vlCDR1
KASQSIVHSNGNTYLE

SEQ ID NO: 35105 - protein, 7 aa, Artificial Sequence
  Description of Artificial Sequence: Synthetic peptide
  XENP024380 vlCDR2
KVSNRFT

SEQ ID NO: 35106 - protein, 9 aa, Artificial Sequence
  Description of Artificial Sequence: Synthetic peptide
  XENP024380 vlCDR3
FQGSHVPNT

SEQ ID NO: 35107 - protein, 251 aa, Artificial Sequence
  Description of Artificial Sequence: Synthetic polypeptide
  XENP024381 1C11_H3.176_L3.94_scFv
QIQLVQSGPELKKPGASVKVSCKASGYTFTHYGMNWVKQAPGQGLEWMGWINTNTGEPTYADKFTGRVVFSLDTSQSTIYLQISSLKAEDTAVYYCARDYYGSSPYWGQGTLVTVSSGKPGSGKPGSGKPGSGKPGSDILMTQSPDSLAVSLGERATINCKSSQSIVHSNGNTYLEWYQQKPGQSPKLLIYKVSNRFTGVPDRFSGSGSGTDFTLTISSVQAEDAATYYCFQGSHVPNTFGQGTKVEIKGS

SEQ ID NO: 35108 - protein, 117 aa, Artificial Sequence; identical to SEQ ID NO: 35099
  Description of Artificial Sequence: Synthetic polypeptide
  VH of XENP024381

SEQ ID NO: 35109 - protein, 114 aa, Artificial Sequence; identical to SEQ ID NO: 35064
  Description of Artificial Sequence: Synthetic polypeptide
  VL of XENP024381

SEQ ID NO: 35110 - protein, 5 aa, Artificial Sequence
  Description of Artificial Sequence: Synthetic peptide
  XENP024381 vhCDR1
HYGMN

SEQ ID NO: 35111 - protein, 17 aa, Artificial Sequence
  Description of Artificial Sequence: Synthetic peptide
  XENP024381 vhCDR2
WINTNTGEPTYADKFTG

SEQ ID NO: 35112 - protein, 8 aa, Artificial Sequence
  Description of Artificial Sequence: Synthetic peptide
  XENP024381 vhCDR3
DYYGSSPY

SEQ ID NO: 35113 - protein, 16 aa, Artificial Sequence
  Description of Artificial Sequence: Synthetic peptide
  XENP024381 vlCDR1
KSSQSIVHSNGNTYLE

SEQ ID NO: 35114 - protein, 7 aa, Artificial Sequence
  Description of Artificial Sequence: Synthetic peptide
  XENP024381 vlCDR2
KVSNRFT

SEQ ID NO: 35115 - protein, 9 aa, Artificial Sequence
  Description of Artificial Sequence: Synthetic peptide
  XENP024381 vlCDR3
FQGSHVPNT

SEQ ID NO: 35116 - protein, 251 aa, Artificial Sequence
  Description of Artificial Sequence: Synthetic polypeptide
  XENP024382 1C11_H3.176_L3.96_scFv
QIQLVQSGPELKKPGASVKVSCKASGYTFTHYGMNWVKQAPGQGLEWMGWINTNTGEPTYADKFTGRVVFSLDTSQSTIYLQISSLKAEDTAVYYCARDYYGSSPYWGQGTLVTVSSGKPGSGKPGSGKPGSGKPGSDIVMTQSPDSLAVSLGERATINCKASQSIVHSNGNTYLEWYQQKPGQPPKLLIYKVSNRFTGVPDRFSGSGSGTDFTLTISSVQAEDAATYYCFQGSHVPNTFGQGTKVEIKGS

SEQ ID NO: 35117 - protein, 117 aa, Artificial Sequence; identical to SEQ ID NO: 35099
  Description of Artificial Sequence: Synthetic polypeptide
  VH of XENP024382

SEQ ID NO: 35118 - protein, 114 aa, Artificial Sequence; identical to SEQ ID NO: 35073
  Description of Artificial Sequence: Synthetic polypeptide
  VL of XENP024382

SEQ ID NO: 35119 - protein, 5 aa, Artificial Sequence
  Description of Artificial Sequence: Synthetic peptide
  XENP024382 vhCDR1
HYGMN

SEQ ID NO: 35120 - protein, 17 aa, Artificial Sequence
  Description of Artificial Sequence: Synthetic peptide
  XENP024382 vhCDR2
WINTNTGEPTYADKFTG

SEQ ID NO: 35121 - protein, 8 aa, Artificial Sequence
  Description of Artificial Sequence: Synthetic peptide
  XENP024382 vhCDR3
DYYGSSPY

SEQ ID NO: 35122 - protein, 16 aa, Artificial Sequence
  Description of Artificial Sequence: Synthetic peptide
  XENP024382 vlCDR1
KASQSIVHSNGNTYLE

SEQ ID NO: 35123 - protein, 7 aa, Artificial Sequence
  Description of Artificial Sequence: Synthetic peptide
  XENP024382 vlCDR2
KVSNRFT

SEQ ID NO: 35124 - protein, 9 aa, Artificial Sequence
  Description of Artificial Sequence: Synthetic peptide
  XENP024382 vlCDR3
FQGSHVPNT

SEQ ID NO: 35125 - protein, 251 aa, Artificial Sequence
  Description of Artificial Sequence: Synthetic polypeptide
  XENP024414 1C11_H3_L3.133_scFv
QIQLVQSGSELKKPGASVKVSCKASGYTFTHYGMNWVRQAPGQGLEWMGWINTYTGEPTYADGFTGRFVFSLDTSVSTAYLQISSLKAEDTAVYFCARDYYGSSPYWGQGTLVTVSSGKPGSGKPGSGKPGSGKPGSDVVMTQSPDSLAVSLGERVTINCKASQSIVHSNGNTYLEWYQQKPGQPPKLLIYKVSNRFSGVPDRFSGSGSGTDFTLTISSVQAEDAATYYCFQGSHVPNTFGQGTKVEIKGS

SEQ ID NO: 35126 - protein, 117 aa, Artificial Sequence; identical to SEQ ID NO: 33034
  Description of Artificial Sequence: Synthetic polypeptide
  VH of XENP024414

SEQ ID NO: 35127 - protein, 114 aa, Artificial Sequence
  Description of Artificial Sequence: Synthetic polypeptide
  VL of XENP024414
DVVMTQSPDSLAVSLGERVTINCKASQSIVHSNGNTYLEWYQQKPGQPPKLLIYKVSNRFSGVPDRFSGSGSGTDFTLTISSVQAEDAATYYCFQGSHVPNTFGQGTKVEIKGS

SEQ ID NO: 35128 - protein, 5 aa, Artificial Sequence
  Description of Artificial Sequence: Synthetic peptide
  XENP024414 vhCDR1
HYGMN

SEQ ID NO: 35129 - protein, 17 aa, Artificial Sequence
  Description of Artificial Sequence: Synthetic peptide
  XENP024414 vhCDR2
WINTYTGEPTYADGFTG

SEQ ID NO: 35130 - protein, 8 aa, Artificial Sequence
  Description of Artificial Sequence: Synthetic peptide
  XENP024414 vhCDR3
DYYGSSPY

SEQ ID NO: 35131 - protein, 16 aa, Artificial Sequence
  Description of Artificial Sequence: Synthetic peptide
  XENP024414 vlCDR1
KASQSIVHSNGNTYLE

SEQ ID NO: 35132 - protein, 7 aa, Artificial Sequence
  Description of Artificial Sequence: Synthetic peptide
  XENP024414 vlCDR2
KVSNRFS

SEQ ID NO: 35133 - protein, 9 aa, Artificial Sequence
  Description of Artificial Sequence: Synthetic peptide
  XENP024414 vlCDR3
FQGSHVPNT

SEQ ID NO: 35134 - protein, 251 aa, Artificial Sequence
  Description of Artificial Sequence: Synthetic polypeptide
  XENP024415 1C11_H3_L3.134_scFv
QIQLVQSGSELKKPGASVKVSCKASGYTFTHYGMNWVRQAPGQGLEWMGWINTYTGEPTYADGFTGRFVFSLDTSVSTAYLQISSLKAEDTAVYFCARDYYGSSPYWGQGTLVTVSSGKPGSGKPGSGKPGSGKPGSDVVMTQSPDSLAVSLGERVTINCKASQSIVHSNGNTYLEWYQQKPGQPPKLLIYKVSNRFSGVPDRFSGSGSGTDFTLTISSVEAEDAATYYCFQGSHVPNTFGQGTKVEIKGS

SEQ ID NO: 35135 - protein, 117 aa, Artificial Sequence; identical to SEQ ID NO: 33034
  Description of Artificial Sequence: Synthetic polypeptide
  VH of XENP024415

SEQ ID NO: 35136 - protein, 114 aa, Artificial Sequence
  Description of Artificial Sequence: Synthetic polypeptide
  VL of XENP024415
DVVMTQSPDSLAVSLGERVTINCKASQSIVHSNGNTYLEWYQQKPGQPPKLLIYKVSNRFSGVPDRFSGSGSGTDFTLTISSVEAEDAATYYCFQGSHVPNTFGQGTKVEIKGS

SEQ ID NO: 35137 - protein, 5 aa, Artificial Sequence
  Description of Artificial Sequence: Synthetic peptide
  XENP024415 vhCDR1
HYGMN

SEQ ID NO: 35138 - protein, 17 aa, Artificial Sequence
  Description of Artificial Sequence: Synthetic peptide
  XENP024415 vhCDR2
WINTYTGEPTYADGFTG

SEQ ID NO: 35139 - protein, 8 aa, Artificial Sequence
  Description of Artificial Sequence: Synthetic peptide
  XENP024415 vhCDR3
DYYGSSPY

SEQ ID NO: 35140 - protein, 16 aa, Artificial Sequence
  Description of Artificial Sequence: Synthetic peptide
  XENP024415 vlCDR1
KASQSIVHSNGNTYLE

SEQ ID NO: 35141 - protein, 7 aa, Artificial Sequence
  Description of Artificial Sequence: Synthetic peptide
  XENP024415 vlCDR2
KVSNRFS

SEQ ID NO: 35142 - protein, 9 aa, Artificial Sequence
  Description of Artificial Sequence: Synthetic peptide
  XENP024415 vlCDR3
FQGSHVPNT

SEQ ID NO: 35143 - protein, 251 aa, Artificial Sequence
  Description of Artificial Sequence: Synthetic polypeptide
  XENP024416 1C11_H3_L3.135_scFv
QIQLVQSGSELKKPGASVKVSCKASGYTFTHYGMNWVRQAPGQGLEWMGWINTYTGEPTYADGFTGRFVFSLDTSVSTAYLQISSLKAEDTAVYFCARDYYGSSPYWGQGTLVTVSSGKPGSGKPGSGKPGSGKPGSDVVMTQSPDSLAVSLGERVTINCKASQSIVHSNGNTYLEWYQQKPGQPPKLLIYKVSNRFSGVPDRFSGSGSGTDFTLTISSMQAEDAATYYCFQGSHVPNTFGQGTKVEIKGS

SEQ ID NO: 35144 - protein, 117 aa, Artificial Sequence; identical to SEQ ID NO: 33034
  Description of Artificial Sequence: Synthetic polypeptide
  VH of XENP024416

SEQ ID NO: 35145 - protein, 114 aa, Artificial Sequence
  Description of Artificial Sequence: Synthetic polypeptide
  VL of XENP024416
DVVMTQSPDSLAVSLGERVTINCKASQSIVHSNGNTYLEWYQQKPGQPPKLLIYKVSNRFSGVPDRFSGSGSGTDFTLTISSMQAEDAATYYCFQGSHVPNTFGQGTKVEIKGS

SEQ ID NO: 35146 - protein, 5 aa, Artificial Sequence
  Description of Artificial Sequence: Synthetic peptide
  XENP024416 vhCDR1
HYGMN

SEQ ID NO: 35147 - protein, 17 aa, Artificial Sequence
  Description of Artificial Sequence: Synthetic peptide
  XENP024416 vhCDR2
WINTYTGEPTYADGFTG

SEQ ID NO: 35148 - protein, 8 aa, Artificial Sequence
  Description of Artificial Sequence: Synthetic peptide
  XENP024416 vhCDR3
DYYGSSPY

SEQ ID NO: 35149 - protein, 16 aa, Artificial Sequence
  Description of Artificial Sequence: Synthetic peptide
  XENP024416 vlCDR1
KASQSIVHSNGNTYLE

SEQ ID NO: 35150 - protein, 7 aa, Artificial Sequence
  Description of Artificial Sequence: Synthetic peptide
  XENP024416 vlCDR2
KVSNRFS

SEQ ID NO: 35151 - protein, 9 aa, Artificial Sequence
  Description of Artificial Sequence: Synthetic peptide
  XENP024416 vlCDR3
FQGSHVPNT

SEQ ID NO: 35152 - protein, 251 aa, Artificial Sequence
  Description of Artificial Sequence: Synthetic polypeptide
  XENP024417 1C11_H3_L3.136_scFv
QIQLVQSGSELKKPGASVKVSCKASGYTFTHYGMNWVRQAPGQGLEWMGWINTYTGEPTYADGFTGRFVFSLDTSVSTAYLQISSLKAEDTAVYFCARDYYGSSPYWGQGTLVTVSSGKPGSGKPGSGKPGSGKPGSDVVMTQSPDSLAVSLGERITINCKASQSIVHSNGNTYLEWYQQKPGQPPKLLIYKVSNRFSGVPDRFSGSGSGTDFTLTISSMQAEDAATYYCFQGSHVPNTFGQGTKVEIKGS

SEQ ID NO: 35153 - protein, 117 aa, Artificial Sequence; identical to SEQ ID NO: 33034
  Description of Artificial Sequence: Synthetic polypeptide
  VH of XENP024417

SEQ ID NO: 35154 - protein, 114 aa, Artificial Sequence
  Description of Artificial Sequence: Synthetic polypeptide
  VL of XENP024417
DVVMTQSPDSLAVSLGERITINCKASQSIVHSNGNTYLEWYQQKPGQPPKLLIYKVSNRFSGVPDRFSGSGSGTDFTLTISSMQAEDAATYYCFQGSHVPNTFGQGTKVEIKGS

SEQ ID NO: 35155 - protein, 5 aa, Artificial Sequence
  Description of Artificial Sequence: Synthetic peptide
  XENP024417 vhCDR1
HYGMN

SEQ ID NO: 35156 - protein, 17 aa, Artificial Sequence
  Description of Artificial Sequence: Synthetic peptide
  XENP024417 vhCDR2
WINTYTGEPTYADGFTG

SEQ ID NO: 35157 - protein, 8 aa, Artificial Sequence
  Description of Artificial Sequence: Synthetic peptide
  XENP024417 vhCDR3
DYYGSSPY

SEQ ID NO: 35158 - protein, 16 aa, Artificial Sequence
  Description of Artificial Sequence: Synthetic peptide
  XENP024417 vlCDR1
KASQSIVHSNGNTYLE

SEQ ID NO: 35159 - protein, 7 aa, Artificial Sequence
  Description of Artificial Sequence: Synthetic peptide
  XENP024417 vlCDR2
KVSNRFS

SEQ ID NO: 35160 - protein, 9 aa, Artificial Sequence
  Description of Artificial Sequence: Synthetic peptide
  XENP024417 vlCDR3
FQGSHVPNT

SEQ ID NO: 35161 - protein, 251 aa, Artificial Sequence
  Description of Artificial Sequence: Synthetic polypeptide
  XENP024418 1C11_H3_L3.137_scFv
QIQLVQSGSELKKPGASVKVSCKASGYTFTHYGMNWVRQAPGQGLEWMGWINTYTGEPTYADGFTGRFVFSLDTSVSTAYLQISSLKAEDTAVYFCARDYYGSSPYWGQGTLVTVSSGKPGSGKPGSGKPGSGKPGSDVVMTQSPDSLAVSLGERITINCKASQSIVHSNGNTYLEWYQQKPGQPPKLLIYKVSNRFSGVPDRFSGSGSGTDFTLTISSVQAEDAATYYCFQGSHVPNTFGQGTKVEIKGS

SEQ ID NO: 35162 - protein, 117 aa, Artificial Sequence; identical to SEQ ID NO: 33034
  Description of Artificial Sequence: Synthetic polypeptide
  VH of XENP024418

SEQ ID NO: 35163 - protein, 114 aa, Artificial Sequence
  Description of Artificial Sequence: Synthetic polypeptide
  VL of XENP024418
DVVMTQSPDSLAVSLGERITINCKASQSIVHSNGNTYLEWYQQKPGQPPKLLIYKVSNRFSGVPDRFSGSGSGTDFTLTISSVQAEDAATYYCFQGSHVPNTFGQGTKVEIKGS

SEQ ID NO: 35164 - protein, 5 aa, Artificial Sequence
  Description of Artificial Sequence: Synthetic peptide
  XENP024418 vhCDR1
HYGMN

SEQ ID NO: 35165 - protein, 17 aa, Artificial Sequence
  Description of Artificial Sequence: Synthetic peptide
  XENP024418 vhCDR2
WINTYTGEPTYADGFTG

SEQ ID NO: 35166 - protein, 8 aa, Artificial Sequence
  Description of Artificial Sequence: Synthetic peptide
  XENP024418 vhCDR3
DYYGSSPY

SEQ ID NO: 35167 - protein, 16 aa, Artificial Sequence
  Description of Artificial Sequence: Synthetic peptide
  XENP024418 vlCDR1
KASQSIVHSNGNTYLE

SEQ ID NO: 35168 - protein, 7 aa, Artificial Sequence
  Description of Artificial Sequence: Synthetic peptide
  XENP024418 vlCDR2
KVSNRFS

SEQ ID NO: 35169 - protein, 9 aa, Artificial Sequence
  Description of Artificial Sequence: Synthetic peptide
  XENP024418 vlCDR3
FQGSHVPNT

SEQ ID NO: 35170 - protein, 251 aa, Artificial Sequence
  Description of Artificial Sequence: Synthetic polypeptide
  XENP024419 1C11_H3_L3.138_scFv
QIQLVQSGSELKKPGASVKVSCKASGYTFTHYGMNWVRQAPGQGLEWMGWINTYTGEPTYADGFTGRFVFSLDTSVSTAYLQISSLKAEDTAVYFCARDYYGSSPYWGQGTLVTVSSGKPGSGKPGSGKPGSGKPGSDVVMTQSPDSLAVSLGERITINCKASQSIVHSNGNTYLEWYQQKPGQPPKLLIYKVSNRFSGVPDRFSGSGSGTDFTLTISSVEAEDAATYYCFQGSHVPNTFGQGTKVEIKGS

SEQ ID NO: 35171 - protein, 117 aa, Artificial Sequence; identical to SEQ ID NO: 33034
  Description of Artificial Sequence: Synthetic polypeptide
  VH of XENP024419

SEQ ID NO: 35172 - protein, 114 aa, Artificial Sequence
  Description of Artificial Sequence: Synthetic polypeptide
  VL of XENP024419
DVVMTQSPDSLAVSLGERITINCKASQSIVHSNGNTYLEWYQQKPGQPPKLLIYKVSNRFSGVPDRFSGSGSGTDFTLTISSVEAEDAATYYCFQGSHVPNTFGQGTKVEIKGS

SEQ ID NO: 35173 - protein, 5 aa, Artificial Sequence
  Description of Artificial Sequence: Synthetic peptide
  XENP024419 vhCDR1
HYGMN

SEQ ID NO: 35174 - protein, 17 aa, Artificial Sequence
  Description of Artificial Sequence: Synthetic peptide
  XENP024419 vhCDR2
WINTYTGEPTYADGFTG

SEQ ID NO: 35175 - protein, 8 aa, Artificial Sequence
  Description of Artificial Sequence: Synthetic peptide
  XENP024419 vhCDR3
DYYGSSPY

SEQ ID NO: 35176 - protein, 16 aa, Artificial Sequence
  Description of Artificial Sequence: Synthetic peptide
  XENP024419 vlCDR1
KASQSIVHSNGNTYLE

SEQ ID NO: 35177 - protein, 7 aa, Artificial Sequence
  Description of Artificial Sequence: Synthetic peptide
  XENP024419 vlCDR2
KVSNRFS

SEQ ID NO: 35178 - protein, 9 aa, Artificial Sequence
  Description of Artificial Sequence: Synthetic peptide
  XENP024419 vlCDR3
FQGSHVPNT

SEQ ID NO: 35179 - protein, 251 aa, Artificial Sequence
  Description of Artificial Sequence: Synthetic polypeptide
  XENP024420 1C11_H3_L3.139_scFv
QIQLVQSGSELKKPGASVKVSCKASGYTFTHYGMNWVRQAPGQGLEWMGWINTYTGEPTYADGFTGRFVFSLDTSVSTAYLQISSLKAEDTAVYFCARDYYGSSPYWGQGTLVTVSSGKPGSGKPGSGKPGSGKPGSDVVMTQSPDSLAVSLGERATINCKASQSIVHSNGNTYLEWYQQKPGQPPKLLIYKVSNRFSGIPDRFSGSGSGTDFTLTISSVQAEDAATYYCFQGSHVPNTFGQGTKVEIKGS

SEQ ID NO: 35180 - protein, 117 aa, Artificial Sequence; identical to SEQ ID NO: 33034
  Description of Artificial Sequence: Synthetic polypeptide
  VH of XENP024420

SEQ ID NO: 35181 - protein, 114 aa, Artificial Sequence
  Description of Artificial Sequence: Synthetic polypeptide
  VL of XENP024420
DVVMTQSPDSLAVSLGERATINCKASQSIVHSNGNTYLEWYQQKPGQPPKLLIYKVSNRFSGIPDRFSGSGSGTDFTLTISSVQAEDAATYYCFQGSHVPNTFGQGTKVEIKGS

SEQ ID NO: 35182 - protein, 5 aa, Artificial Sequence
  Description of Artificial Sequence: Synthetic peptide
  XENP024420 vhCDR1
HYGMN

SEQ ID NO: 35183 - protein, 17 aa, Artificial Sequence
  Description of Artificial Sequence: Synthetic peptide
  XENP024420 vhCDR2
WINTYTGEPTYADGFTG

SEQ ID NO: 35184 - protein, 8 aa, Artificial Sequence
  Description of Artificial Sequence: Synthetic peptide
  XENP024420 vhCDR3
DYYGSSPY

SEQ ID NO: 35185 - protein, 16 aa, Artificial Sequence
  Description of Artificial Sequence: Synthetic peptide
  XENP024420 vlCDR1
KASQSIVHSNGNTYLE

SEQ ID NO: 35186 - protein, 7 aa, Artificial Sequence
  Description of Artificial Sequence: Synthetic peptide
  XENP024420 vlCDR2
KVSNRFS

SEQ ID NO: 35187 - protein, 9 aa, Artificial Sequence
  Description of Artificial Sequence: Synthetic peptide
  XENP024420 vlCDR3
FQGSHVPNT

SEQ ID NO: 35188 - protein, 251 aa, Artificial Sequence
  Description of Artificial Sequence: Synthetic polypeptide
  XENP024421 1C11_H3_L3.140_scFv
QIQLVQSGSELKKPGASVKVSCKASGYTFTHYGMNWVRQAPGQGLEWMGWINTYTGEPTYADGFTGRFVFSLDTSVSTAYLQISSLKAEDTAVYFCARDYYGSSPYWGQGTLVTVSSGKPGSGKPGSGKPGSGKPGSDIVMTQSPDSLAVSLGERATINCKASQSIVHSNGNTYLEWYQQKPGQSPKLLIYKVSNRFSGVPDRFSGSGSGTDFTLTISSVEAEDVATYYCFQGSHVPNTFGQGTKVEIKGS

SEQ ID NO: 35189 - protein, 117 aa, Artificial Sequence; identical to SEQ ID NO: 33034
  Description of Artificial Sequence: Synthetic polypeptide
  VH of XENP024421

SEQ ID NO: 35190 - protein, 114 aa, Artificial Sequence
  Description of Artificial Sequence: Synthetic polypeptide
  VL of XENP024421
DIVMTQSPDSLAVSLGERATINCKASQSIVHSNGNTYLEWYQQKPGQSPKLLIYKVSNRFSGVPDRFSGSGSGTDFTLTISSVEAEDVATYYCFQGSHVPNTFGQGTKVEIKGS

SEQ ID NO: 35191 - protein, 5 aa, Artificial Sequence
  Description of Artificial Sequence: Synthetic peptide
  XENP024421 vhCDR1
HYGMN

SEQ ID NO: 35192 - protein, 17 aa, Artificial Sequence
  Description of Artificial Sequence: Synthetic peptide
  XENP024421 vhCDR2
WINTYTGEPTYADGFTG

SEQ ID NO: 35193 - protein, 8 aa, Artificial Sequence
  Description of Artificial Sequence: Synthetic peptide
  XENP024421 vhCDR3
DYYGSSPY

SEQ ID NO: 35194 - protein, 16 aa, Artificial Sequence
  Description of Artificial Sequence: Synthetic peptide
  XENP024421 vlCDR1
KASQSIVHSNGNTYLE

SEQ ID NO: 35195 - protein, 7 aa, Artificial Sequence
  Description of Artificial Sequence: Synthetic peptide
  XENP024421 vlCDR2
KVSNRFS

SEQ ID NO: 35196 - protein, 9 aa, Artificial Sequence
  Description of Artificial Sequence: Synthetic peptide
  XENP024421 vlCDR3
FQGSHVPNT

SEQ ID NO: 35197 - protein, 251 aa, Artificial Sequence
  Description of Artificial Sequence: Synthetic polypeptide
  XENP024422 1C11_H3_L3.141_scFv
QIQLVQSGSELKKPGASVKVSCKASGYTFTHYGMNWVRQAPGQGLEWMGWINTYTGEPTYADGFTGRFVFSLDTSVSTAYLQISSLKAEDTAVYFCARDYYGSSPYWGQGTLVTVSSGKPGSGKPGSGKPGSGKPGSDIVMTQSPDSLAVSLGERATINCKASQSIVHSNGNTYLEWYQQKPGQPPKLLIYKVSNRFSGVPDRFSGSGSGTDFTLTISSVEAEDVATYYCFQGSHVPNTFGQGTKVEIKGS

SEQ ID NO: 35198 - protein, 117 aa, Artificial Sequence; identical to SEQ ID NO: 33034
  Description of Artificial Sequence: Synthetic polypeptide
  VH of XENP024422

SEQ ID NO: 35199 - protein, 114 aa, Artificial Sequence
  Description of Artificial Sequence: Synthetic polypeptide
  VL of XENP024422
DIVMTQSPDSLAVSLGERATINCKASQSIVHSNGNTYLEWYQQKPGQPPKLLIYKVSNRFSGVPDRFSGSGSGTDFTLTISSVEAEDVATYYCFQGSHVPNTFGQGTKVEIKGS

SEQ ID NO: 35200 - protein, 5 aa, Artificial Sequence
  Description of Artificial Sequence: Synthetic peptide
  XENP024422 vhCDR1
HYGMN

SEQ ID NO: 35201 - protein, 17 aa, Artificial Sequence
  Description of Artificial Sequence: Synthetic peptide
  XENP024422 vhCDR2
WINTYTGEPTYADGFTG

SEQ ID NO: 35202 - protein, 8 aa, Artificial Sequence
  Description of Artificial Sequence: Synthetic peptide
  XENP024422 vhCDR3
DYYGSSPY

SEQ ID NO: 35203 - protein, 16 aa, Artificial Sequence
  Description of Artificial Sequence: Synthetic peptide
  XENP024422 vlCDR1
KASQSIVHSNGNTYLE

SEQ ID NO: 35204 - protein, 7 aa, Artificial Sequence
  Description of Artificial Sequence: Synthetic peptide
  XENP024422 vlCDR2
KVSNRFS

SEQ ID NO: 35205 - protein, 9 aa, Artificial Sequence
  Description of Artificial Sequence: Synthetic peptide
  XENP024422 vlCDR3
FQGSHVPNT

SEQ ID NO: 35206 - protein, 251 aa, Artificial Sequence
  Description of Artificial Sequence: Synthetic polypeptide
  XENP024423 1C11_H3_L3.142_scFv
QIQLVQSGSELKKPGASVKVSCKASGYTFTHYGMNWVRQAPGQGLEWMGWINTYTGEPTYADGFTGRFVFSLDTSVSTAYLQISSLKAEDTAVYFCARDYYGSSPYWGQGTLVTVSSGKPGSGKPGSGKPGSGKPGSDIVMTQSPDSLAVSLGERATINCKASQSIVHSNGNTYLEWYQQKPGQAPKLLIYKVSNRFSGVPDRFSGSGSGTDFTLTISSVEAEDVATYYCFQGSHVPNTFGQGTKVEIKGS

SEQ ID NO: 35207 - protein, 117 aa, Artificial Sequence; identical to SEQ ID NO: 33034
  Description of Artificial Sequence: Synthetic polypeptide
  VH of XENP024423

SEQ ID NO: 35208 - protein, 114 aa, Artificial Sequence
  Description of Artificial Sequence: Synthetic polypeptide
  VL of XENP024423
DIVMTQSPDSLAVSLGERATINCKASQSIVHSNGNTYLEWYQQKPGQAPKLLIYKVSNRFSGVPDRFSGSGSGTDFTLTISSVEAEDVATYYCFQGSHVPNTFGQGTKVEIKGS

SEQ ID NO: 35209 - protein, 5 aa, Artificial Sequence
  Description of Artificial Sequence: Synthetic peptide
  XENP024423 vhCDR1
HYGMN

SEQ ID NO: 35210 - protein, 17 aa, Artificial Sequence
  Description of Artificial Sequence: Synthetic peptide
  XENP024423 vhCDR2
WINTYTGEPTYADGFTG

SEQ ID NO: 35211 - protein, 8 aa, Artificial Sequence
  Description of Artificial Sequence: Synthetic peptide
  XENP024423 vhCDR3
DYYGSSPY

SEQ ID NO: 35212 - protein, 16 aa, Artificial Sequence
  Description of Artificial Sequence: Synthetic peptide
  XENP024423 vlCDR1
KASQSIVHSNGNTYLE

SEQ ID NO: 35213 - protein, 7 aa, Artificial Sequence
  Description of Artificial Sequence: Synthetic peptide
  XENP024423 vlCDR2
KVSNRFS

SEQ ID NO: 35214 - protein, 9 aa, Artificial Sequence
  Description of Artificial Sequence: Synthetic peptide
  XENP024423 vlCDR3
FQGSHVPNT

SEQ ID NO: 35215 - protein, 251 aa, Artificial Sequence
  Description of Artificial Sequence: Synthetic polypeptide
  XENP024424 1C11_H3.176_L3_scFv
QIQLVQSGSELKKPGASVKVSCKASGYTFTHYGMNWVRQAPGQGLEWMGWINTYTGEPTYAPGFKGRFVFSLDTSVSTAYLQISSLKAEDTAVYFCARDYYGSSPYWGQGTLVTVSSGKPGSGKPGSGKPGSGKPGSDVLMTQSPDSLAVSLGERATINCKSSQSIVHSNGNTYLEWYQQKPGQSPKLLIYKVSNRFSGVPDRFSGSGSGTDFTLTISSLQAEDVAVYYCFQGSHVPNTFGGGTKVEIKGS

SEQ ID NO: 35216 - protein, 117 aa, Artificial Sequence
  Description of Artificial Sequence: Synthetic polypeptide
  VH of XENP024424
QIQLVQSGSELKKPGASVKVSCKASGYTFTHYGMNWVRQAPGQGLEWMGWINTYTGEPTYAPGFKGRFVFSLDTSVSTAYLQISSLKAEDTAVYFCARDYYGSSPYWGQGTLVTVSS

SEQ ID NO: 35217 - protein, 114 aa, Artificial Sequence; identical to SEQ ID NO: 33651
  Description of Artificial Sequence: Synthetic polypeptide
  VL of XENP024424

SEQ ID NO: 35218 - protein, 5 aa, Artificial Sequence
  Description of Artificial Sequence: Synthetic peptide
  XENP024424 vhCDR1
HYGMN

SEQ ID NO: 35219 - protein, 17 aa, Artificial Sequence
  Description of Artificial Sequence: Synthetic peptide
  XENP024424 vhCDR2
WINTYTGEPTYAPGFKG

SEQ ID NO: 35220 - protein, 8 aa, Artificial Sequence
  Description of Artificial Sequence: Synthetic peptide
  XENP024424 vhCDR3
DYYGSSPY

SEQ ID NO: 35221 - protein, 16 aa, Artificial Sequence
  Description of Artificial Sequence: Synthetic peptide
  XENP024424 vlCDR1
KSSQSIVHSNGNTYLE

SEQ ID NO: 35222 - protein, 7 aa, Artificial Sequence
  Description of Artificial Sequence: Synthetic peptide
  XENP024424 vlCDR2
KVSNRFS

SEQ ID NO: 35223 - protein, 9 aa, Artificial Sequence
  Description of Artificial Sequence: Synthetic peptide
  XENP024424 vlCDR3
FQGSHVPNT

SEQ ID NO: 35224 - protein, 251 aa, Artificial Sequence
  Description of Artificial Sequence: Synthetic polypeptide
  XENP024425 1C11_H3.177_L3_scFv
QIQLVQSGSELKKPGASVKVSCKASGYTFTHYGMNWVRQAPGQGLEWMGWINTYTGEPTYAPKFTGRFVFSLDTSVSTAYLQISSLKAEDTAVYFCARDYYGSSPYWGQGTLVTVSSGKPGSGKPGSGKPGSGKPGSDVLMTQSPDSLAVSLGERATINCKSSQSIVHSNGNTYLEWYQQKPGQSPKLLIYKVSNRFSGVPDRFSGSGSGTDFTLTISSLQAEDVAVYYCFQGSHVPNTFGGGTKVEIKGS

SEQ ID NO: 35225 - protein, 117 aa, Artificial Sequence
  Description of Artificial Sequence: Synthetic polypeptide
  VH of XENP024425
QIQLVQSGSELKKPGASVKVSCKASGYTFTHYGMNWVRQAPGQGLEWMGWINTYTGEPTYAPKFTGRFVFSLDTSVSTAYLQISSLKAEDTAVYFCARDYYGSSPYWGQGTLVTVSS

SEQ ID NO: 35226 - protein, 114 aa, Artificial Sequence; identical to SEQ ID NO: 33651
  Description of Artificial Sequence: Synthetic polypeptide
  VL of XENP024425

SEQ ID NO: 35227 - protein, 5 aa, Artificial Sequence
  Description of Artificial Sequence: Synthetic peptide
  XENP024425 vhCDR1
HYGMN

SEQ ID NO: 35228 - protein, 17 aa, Artificial Sequence
  Description of Artificial Sequence: Synthetic peptide
  XENP024425 vhCDR2
WINTYTGEPTYAPKFTG

SEQ ID NO: 35229 - protein, 8 aa, Artificial Sequence
  Description of Artificial Sequence: Synthetic peptide
  XENP024425 vhCDR3
DYYGSSPY

SEQ ID NO: 35230 - protein, 16 aa, Artificial Sequence
  Description of Artificial Sequence: Synthetic peptide
  XENP024425 vlCDR1
KSSQSIVHSNGNTYLE

SEQ ID NO: 35231 - protein, 7 aa, Artificial Sequence
  Description of Artificial Sequence: Synthetic peptide
  XENP024425 vlCDR2
KVSNRFS

SEQ ID NO: 35232 - protein, 9 aa, Artificial Sequence
  Description of Artificial Sequence: Synthetic peptide
  XENP024425 vlCDR3
FQGSHVPNT

SEQ ID NO: 35233 - protein, 251 aa, Artificial Sequence
  Description of Artificial Sequence: Synthetic polypeptide
  XENP024426 1C11_H3.178_L3_scFv
QIQLVQSGSELKKPGASVKVSCKASGYTFTHYGMNWVRQAPGQGLEWMGWINTYTGEPTYAPGFKERFVFSLDTSVSTAYLQISSLKAEDTAVYFCARDYYGSSPYWGQGTLVTVSSGKPGSGKPGSGKPGSGKPGSDVLMTQSPDSLAVSLGERATINCKSSQSIVHSNGNTYLEWYQQKPGQSPKLLIYKVSNRFSGVPDRFSGSGSGTDFTLTISSLQAEDVAVYYCFQGSHVPNTFGGGTKVEIKGS

SEQ ID NO: 35234 - protein, 117 aa, Artificial Sequence
  Description of Artificial Sequence: Synthetic polypeptide
  VH of XENP024426
QIQLVQSGSELKKPGASVKVSCKASGYTFTHYGMNWVRQAPGQGLEWMGWINTYTGEPTYAPGFKERFVFSLDTSVSTAYLQISSLKAEDTAVYFCARDYYGSSPYWGQGTLVTVSS

SEQ ID NO: 35235 - protein, 114 aa, Artificial Sequence; identical to SEQ ID NO: 33651
  Description of Artificial Sequence: Synthetic polypeptide
  VL of XENP024426

SEQ ID NO: 35236 - protein, 5 aa, Artificial Sequence
  Description of Artificial Sequence: Synthetic peptide
  XENP024426 vhCDR1
HYGMN

SEQ ID NO: 35237 - protein, 17 aa, Artificial Sequence
  Description of Artificial Sequence: Synthetic peptide
  XENP024426 vhCDR2
WINTYTGEPTYAPGFKE

SEQ ID NO: 35238 - protein, 8 aa, Artificial Sequence
  Description of Artificial Sequence: Synthetic peptide
  XENP024426 vhCDR3
DYYGSSPY

SEQ ID NO: 35239 - protein, 16 aa, Artificial Sequence
  Description of Artificial Sequence: Synthetic peptide
  XENP024426 vlCDR1
KSSQSIVHSNGNTYLE

SEQ ID NO: 35240 - protein, 7 aa, Artificial Sequence
  Description of Artificial Sequence: Synthetic peptide
  XENP024426 vlCDR2
KVSNRFS

SEQ ID NO: 35241 - protein, 9 aa, Artificial Sequence
  Description of Artificial Sequence: Synthetic peptide
  XENP024426 vlCDR3
FQGSHVPNT

SEQ ID NO: 35242 - protein, 251 aa, Artificial Sequence
  Description of Artificial Sequence: Synthetic polypeptide
  XENP024427 1C11_H3.179_L3_scFv
QIQLVQSGSELKKPGASVKVSCKASGYTFTHYGMNWVRQAPGQGLEWMGWINTYTGEPTYAPKFTERFVFSLDTSVSTAYLQISSLKAEDTAVYFCARDYYGSSPYWGQGTLVTVSSGKPGSGKPGSGKPGSGKPGSDVLMTQSPDSLAVSLGERATINCKSSQSIVHSNGNTYLEWYQQKPGQSPKLLIYKVSNRFSGVPDRFSGSGSGTDFTLTISSLQAEDVAVYYCFQGSHVPNTFGGGTKVEIKGS

SEQ ID NO: 35243 - protein, 117 aa, Artificial Sequence
  Description of Artificial Sequence: Synthetic polypeptide
  VH of XENP024427
QIQLVQSGSELKKPGASVKVSCKASGYTFTHYGMNWVRQAPGQGLEWMGWINTYTGEPTYAPKFTERFVFSLDTSVSTAYLQISSLKAEDTAVYFCARDYYGSSPYWGQGTLVTVSS

SEQ ID NO: 35244 - protein, 114 aa, Artificial Sequence; identical to SEQ ID NO: 33651
  Description of Artificial Sequence: Synthetic polypeptide
  VL of XENP024427

SEQ ID NO: 35245 - protein, 5 aa, Artificial Sequence
  Description of Artificial Sequence: Synthetic peptide
  XENP024427 vhCDR1
HYGMN

SEQ ID NO: 35246 - protein, 17 aa, Artificial Sequence
  Description of Artificial Sequence: Synthetic peptide
  XENP024427 vhCDR2
WINTYTGEPTYAPKFTE

SEQ ID NO: 35247 - protein, 8 aa, Artificial Sequence
  Description of Artificial Sequence: Synthetic peptide
  XENP024427 vhCDR3
DYYGSSPY

SEQ ID NO: 35248 - protein, 16 aa, Artificial Sequence
  Description of Artificial Sequence: Synthetic peptide
  XENP024427 vlCDR1
KSSQSIVHSNGNTYLE

SEQ ID NO: 35249 - protein, 7 aa, Artificial Sequence
  Description of Artificial Sequence: Synthetic peptide
  XENP024427 vlCDR2
KVSNRFS

SEQ ID NO: 35250 - protein, 9 aa, Artificial Sequence
  Description of Artificial Sequence: Synthetic peptide
  XENP024427 vlCDR3
FQGSHVPNT

SEQ ID NO: 35251 - protein, 251 aa, Artificial Sequence
  Description of Artificial Sequence: Synthetic polypeptide
  XENP024428 1C11_H3.180_L3_scFv
QIQLVQSGSELKKPGASVKVSCKASGYTFTHYGINWVRQAPGQGLEWMGWINTYTGEPTYADGFTGRFVFSVDTSVSTAYLQISSLKAEDTAVYFCARDYYGSSPYWGQGTLVTVSSGKPGSGKPGSGKPGSGKPGSDVLMTQSPDSLAVSLGERATINCKSSQSIVHSNGNTYLEWYQQKPGQSPKLLIYKVSNRFSGVPDRFSGSGSGTDFTLTISSLQAEDVAVYYCFQGSHVPNTFGGGTKVEIKGS

SEQ ID NO: 35252 - protein, 117 aa, Artificial Sequence
  Description of Artificial Sequence: Synthetic polypeptide
  VH of XENP024428
QIQLVQSGSELKKPGASVKVSCKASGYTFTHYGINWVRQAPGQGLEWMGWINTYTGEPTYADGFTGRFVFSVDTSVSTAYLQISSLKAEDTAVYFCARDYYGSSPYWGQGTLVTVSS

SEQ ID NO: 35253 - protein, 114 aa, Artificial Sequence; identical to SEQ ID NO: 33651
  Description of Artificial Sequence: Synthetic polypeptide
  VL of XENP024428

SEQ ID NO: 35254 - protein, 5 aa, Artificial Sequence
  Description of Artificial Sequence: Synthetic peptide
  XENP024428 vhCDR1
HYGIN

SEQ ID NO: 35255 - protein, 17 aa, Artificial Sequence
  Description of Artificial Sequence: Synthetic peptide
  XENP024428 vhCDR2
WINTYTGEPTYADGFTG

SEQ ID NO: 35256 - protein, 8 aa, Artificial Sequence
  Description of Artificial Sequence: Synthetic peptide
  XENP024428 vhCDR3
DYYGSSPY

SEQ ID NO: 35257 - protein, 16 aa, Artificial Sequence
  Description of Artificial Sequence: Synthetic peptide
  XENP024428 vlCDR1
KSSQSIVHSNGNTYLE

SEQ ID NO: 35258 - protein, 7 aa, Artificial Sequence
  Description of Artificial Sequence: Synthetic peptide
  XENP024428 vlCDR2
KVSNRFS

SEQ ID NO: 35259 - protein, 9 aa, Artificial Sequence
  Description of Artificial Sequence: Synthetic peptide
  XENP024428 vlCDR3
FQGSHVPNT

SEQ ID NO: 35260 - protein, 251 aa, Artificial Sequence
  Description of Artificial Sequence: Synthetic polypeptide
  XENP024429 1C11_H3.181_L3_scFv
QIQLVQSGSELKKPGASVKVSCKASGYTFTHYGINWVRQAPGQGLEWMGWINTYTGEPTYADGFTGRFVFSIDTSVSTAYLQISSLKAEDTAVYFCARDYYGSSPYWGQGTLVTVSSGKPGSGKPGSGKPGSGKPGSDVLMTQSPDSLAVSLGERATINCKSSQSIVHSNGNTYLEWYQQKPGQSPKLLIYKVSNRFSGVPDRFSGSGSGTDFTLTISSLQAEDVAVYYCFQGSHVPNTFGGGTKVEIKGS

SEQ ID NO: 35261 - protein, 117 aa, Artificial Sequence
  Description of Artificial Sequence: Synthetic polypeptide
  VH of XENP024429
QIQLVQSGSELKKPGASVKVSCKASGYTFTHYGINWVRQAPGQGLEWMGWINTYTGEPTYADGFTGRFVFSIDTSVSTAYLQISSLKAEDTAVYFCARDYYGSSPYWGQGTLVTVSS

SEQ ID NO: 35262 - protein, 114 aa, Artificial Sequence; identical to SEQ ID NO: 33651
  Description of Artificial Sequence: Synthetic polypeptide
  VL of XENP024429

SEQ ID NO: 35263 - protein, 5 aa, Artificial Sequence
  Description of Artificial Sequence: Synthetic peptide
  XENP024429 vhCDR1
HYGIN

SEQ ID NO: 35264 - protein, 17 aa, Artificial Sequence
  Description of Artificial Sequence: Synthetic peptide
  XENP024429 vhCDR2
WINTYTGEPTYADGFTG

SEQ ID NO: 35265 - protein, 8 aa, Artificial Sequence
  Description of Artificial Sequence: Synthetic peptide
  XENP024429 vhCDR3
DYYGSSPY

SEQ ID NO: 35266 - protein, 16 aa, Artificial Sequence
  Description of Artificial Sequence: Synthetic peptide
  XENP024429 vlCDR1
KSSQSIVHSNGNTYLE

SEQ ID NO: 35267 - protein, 7 aa, Artificial Sequence
  Description of Artificial Sequence: Synthetic peptide
  XENP024429 vlCDR2
KVSNRFS

SEQ ID NO: 35268 - protein, 9 aa, Artificial Sequence
  Description of Artificial Sequence: Synthetic peptide
  XENP024429 vlCDR3
FQGSHVPNT

SEQ ID NO: 35269 - protein, 251 aa, Artificial Sequence
  Description of Artificial Sequence: Synthetic polypeptide
  XENP024430 1C11_H3.182_L3_scFv
QIQLVQSGSELVKPGESVKVSCKASGYTFTHYGMNWVRQAPGQGLEWMGWINTYTGEPTYADGFTGRFVFSLDTSVSTAYLQISSLKAEDTAVYFCARDYYGSSPYWGQGTLVTVSSGKPGSGKPGSGKPGSGKPGSDVLMTQSPDSLAVSLGERATINCKSSQSIVHSNGNTYLEWYQQKPGQSPKLLIYKVSNRFSGVPDRFSGSGSGTDFTLTISSLQAEDVAVYYCFQGSHVPNTFGGGTKVEIKGS

SEQ ID NO: 35270 - protein, 117 aa, Artificial Sequence
  Description of Artificial Sequence: Synthetic polypeptide
  VH of XENP024430
QIQLVQSGSELVKPGESVKVSCKASGYTFTHYGMNWVRQAPGQGLEWMGWINTYTGEPTYADGFTGRFVFSLDTSVSTAYLQISSLKAEDTAVYFCARDYYGSSPYWGQGTLVTVSS

SEQ ID NO: 35271 - protein, 114 aa, Artificial Sequence; identical to SEQ ID NO: 33651
  Description of Artificial Sequence: Synthetic polypeptide
  VL of XENP024430

SEQ ID NO: 35272 - protein, 5 aa, Artificial Sequence
  Description of Artificial Sequence: Synthetic peptide
  XENP024430 vhCDR1
HYGMN

SEQ ID NO: 35273 - protein, 17 aa, Artificial Sequence
  Description of Artificial Sequence: Synthetic peptide
  XENP024430 vhCDR2
WINTYTGEPTYADGFTG

SEQ ID NO: 35274 - protein, 8 aa, Artificial Sequence
  Description of Artificial Sequence: Synthetic peptide
  XENP024430 vhCDR3
DYYGSSPY

SEQ ID NO: 35275 - protein, 16 aa, Artificial Sequence
  Description of Artificial Sequence: Synthetic peptide
  XENP024430 vlCDR1
KSSQSIVHSNGNTYLE

SEQ ID NO: 35276 - protein, 7 aa, Artificial Sequence
  Description of Artificial Sequence: Synthetic peptide
  XENP024430 vlCDR2
KVSNRFS

SEQ ID NO: 35277 - protein, 9 aa, Artificial Sequence
  Description of Artificial Sequence: Synthetic peptide
  XENP024430 vlCDR3
FQGSHVPNT

SEQ ID NO: 35278 - protein, 251 aa, Artificial Sequence
  Description of Artificial Sequence: Synthetic polypeptide
  XENP024431 1C11_H3.183_L3_scFv
QIQLVQSGSVLKKPGESVKVSCKASGYTFTHYGMNWVRQAPGQGLEWMGWINTYTGEPTYADGFTGRFVFSLDTSVSTAYLQISSLKAEDTAVYFCARDYYGSSPYWGQGTLVTVSSGKPGSGKPGSGKPGSGKPGSDVLMTQSPDSLAVSLGERATINCKSSQSIVHSNGNTYLEWYQQKPGQSPKLLIYKVSNRFSGVPDRFSGSGSGTDFTLTISSLQAEDVAVYYCFQGSHVPNTFGGGTKVEIKGS

SEQ ID NO: 35279 - protein, 117 aa, Artificial Sequence
  Description of Artificial Sequence: Synthetic polypeptide
  VH of XENP024431
QIQLVQSGSVLKKPGESVKVSCKASGYTFTHYGMNWVRQAPGQGLEWMGWINTYTGEPTYADGFTGRFVFSLDTSVSTAYLQISSLKAEDTAVYFCARDYYGSSPYWGQGTLVTVSS

SEQ ID NO: 35280 - protein, 114 aa, Artificial Sequence; identical to SEQ ID NO: 33651
  Description of Artificial Sequence: Synthetic polypeptide
  VL of XENP024431

SEQ ID NO: 35281 - protein, 5 aa, Artificial Sequence
  Description of Artificial Sequence: Synthetic peptide
  XENP024431 vhCDR1
HYGMN

SEQ ID NO: 35282 - protein, 17 aa, Artificial Sequence
  Description of Artificial Sequence: Synthetic peptide
  XENP024431 vhCDR2
WINTYTGEPTYADGFTG

SEQ ID NO: 35283 - protein, 8 aa, Artificial Sequence
  Description of Artificial Sequence: Synthetic peptide
  XENP024431 vhCDR3
DYYGSSPY

SEQ ID NO: 35284 - protein, 16 aa, Artificial Sequence
  Description of Artificial Sequence: Synthetic peptide
  XENP024431 vlCDR1
KSSQSIVHSNGNTYLE

SEQ ID NO: 35285 - protein, 7 aa, Artificial Sequence
  Description of Artificial Sequence: Synthetic peptide
  XENP024431 vlCDR2
KVSNRFS

SEQ ID NO: 35286 - protein, 9 aa, Artificial Sequence
  Description of Artificial Sequence: Synthetic peptide
  XENP024431 vlCDR3
FQGSHVPNT

SEQ ID NO: 35287 - protein, 251 aa, Artificial Sequence
  Description of Artificial Sequence: Synthetic polypeptide
  XENP024432 1C11_H3.184_L3_scFv
QIQLVQSGSVLVKPGESVKVSCKASGYTFTHYGMNWVRQAPGQGLEWMGWINTYTGEPTYADGFTGRFVFSLDTSVSTAYLQISSLKAEDTAVYFCARDYYGSSPYWGQGTLVTVSSGKPGSGKPGSGKPGSGKPGSDVLMTQSPDSLAVSLGERATINCKSSQSIVHSNGNTYLEWYQQKPGQSPKLLIYKVSNRFSGVPDRFSGSGSGTDFTLTISSLQAEDVAVYYCFQGSHVPNTFGGGTKVEIKGS

SEQ ID NO: 35288 - protein, 117 aa, Artificial Sequence
  Description of Artificial Sequence: Synthetic polypeptide
  VH of XENP024432
QIQLVQSGSVLVKPGESVKVSCKASGYTFTHYGMNWVRQAPGQGLEWMGWINTYTGEPTYADGFTGRFVFSLDTSVSTAYLQISSLKAEDTAVYFCARDYYGSSPYWGQGTLVTVSS

SEQ ID NO: 35289 - protein, 114 aa, Artificial Sequence; identical to SEQ ID NO: 33651
  Description of Artificial Sequence: Synthetic polypeptide
  VL of XENP024432

SEQ ID NO: 35290 - protein, 5 aa, Artificial Sequence
  Description of Artificial Sequence: Synthetic peptide
  XENP024432 vhCDR1
HYGMN

SEQ ID NO: 35291 - protein, 17 aa, Artificial Sequence
  Description of Artificial Sequence: Synthetic peptide
  XENP024432 vhCDR2
WINTYTGEPTYADGFTG

SEQ ID NO: 35292 - protein, 8 aa, Artificial Sequence
  Description of Artificial Sequence: Synthetic peptide
  XENP024432 vhCDR3
DYYGSSPY

SEQ ID NO: 35293 - protein, 16 aa, Artificial Sequence
  Description of Artificial Sequence: Synthetic peptide
  XENP024432 vlCDR1
KSSQSIVHSNGNTYLE

SEQ ID NO: 35294 - protein, 7 aa, Artificial Sequence
  Description of Artificial Sequence: Synthetic peptide
  XENP024432 vlCDR2
KVSNRFS

SEQ ID NO: 35295 - protein, 9 aa, Artificial Sequence
  Description of Artificial Sequence: Synthetic peptide
  XENP024432 vlCDR3
FQGSHVPNT

SEQ ID NO: 35296 - protein, 251 aa, Artificial Sequence
  Description of Artificial Sequence: Synthetic polypeptide
  XENP024433 1C11_H3.185_L3_scFv
EVQLVQSGSELVKPGESVKVSCKASGYTFTHYGINWVRQPPGQGLEWIGWINTYTGEPYYAPKFTERFVFSLDTSQDTAYLQINSLKAEDTAVYYCARDYYGSSPYWGQGTLVTVSSGKPGSGKPGSGKPGSGKPGSDVLMTQSPDSLAVSLGERATINCKSSQSIVHSNGNTYLEWYQQKPGQSPKLLIYKVSNRFSGVPDRFSGSGSGTDFTLTISSLQAEDVAVYYCFQGSHVPNTFGGGTKVEIKGS

SEQ ID NO: 35297 - protein, 117 aa, Artificial Sequence
  Description of Artificial Sequence: Synthetic polypeptide
  VH of XENP024433
EVQLVQSGSELVKPGESVKVSCKASGYTFTHYGINWVRQPPGQGLEWIGWINTYTGEPYYAPKFTERFVFSLDTSQDTAYLQINSLKAEDTAVYYCARDYYGSSPYWGQGTLVTVSS

SEQ ID NO: 35298 - protein, 114 aa, Artificial Sequence; identical to SEQ ID NO: 33651
  Description of Artificial Sequence: Synthetic polypeptide
  VL of XENP024433

SEQ ID NO: 35299 - protein, 5 aa, Artificial Sequence
  Description of Artificial Sequence: Synthetic peptide
  XENP024433 vhCDR1
HYGIN

SEQ ID NO: 35300 - protein, 17 aa, Artificial Sequence
  Description of Artificial Sequence: Synthetic peptide
  XENP024433 vhCDR2
WINTYTGEPYYAPKFTE

SEQ ID NO: 35301 - protein, 8 aa, Artificial Sequence
  Description of Artificial Sequence: Synthetic peptide
  XENP024433 vhCDR3
DYYGSSPY

SEQ ID NO: 35302 - protein, 16 aa, Artificial Sequence
  Description of Artificial Sequence: Synthetic peptide
  XENP024433 vlCDR1
KSSQSIVHSNGNTYLE

SEQ ID NO: 35303 - protein, 7 aa, Artificial Sequence
  Description of Artificial Sequence: Synthetic peptide
  XENP024433 vlCDR2
KVSNRFS

SEQ ID NO: 35304 - protein, 9 aa, Artificial Sequence
  Description of Artificial Sequence: Synthetic peptide
  XENP024433 vlCDR3
FQGSHVPNT

SEQ ID NO: 35305 - protein, 251 aa, Artificial Sequence
  Description of Artificial Sequence: Synthetic polypeptide
  XENP024434 1C11_H3.186_L3_scFv
EVQLVQSGSELVKPGESVKVSCKASGYTFTHYGINWVRQPPGQGLEWMGWINTYTGEPYYAPGFTERFVFSLDTSVDTAYLQINSLKAEDTAVYYCARDYYGSSPYWGQGTLVTVSSGKPGSGKPGSGKPGSGKPGSDVLMTQSPDSLAVSLGERATINCKSSQSIVHSNGNTYLEWYQQKPGQSPKLLIYKVSNRFSGVPDRFSGSGSGTDFTLTISSLQAEDVAVYYCFQGSHVPNTFGGGTKVEIKGS

SEQ ID NO: 35306 - protein, 117 aa, Artificial Sequence
  Description of Artificial Sequence: Synthetic polypeptide
  VH of XENP024434
EVQLVQSGSELVKPGESVKVSCKASGYTFTHYGINWVRQPPGQGLEWMGWINTYTGEPYYAPGFTERFVFSLDTSVDTAYLQINSLKAEDTAVYYCARDYYGSSPYWGQGTLVTVSS

SEQ ID NO: 35307 - protein, 114 aa, Artificial Sequence; identical to SEQ ID NO: 33651
  Description of Artificial Sequence: Synthetic polypeptide
  VL of XENP024434

SEQ ID NO: 35308 - protein, 5 aa, Artificial Sequence
  Description of Artificial Sequence: Synthetic peptide
  XENP024434 vhCDR1
HYGIN

SEQ ID NO: 35309 - protein, 17 aa, Artificial Sequence
  Description of Artificial Sequence: Synthetic peptide
  XENP024434 vhCDR2
WINTYTGEPYYAPGFTE

SEQ ID NO: 35310 - protein, 8 aa, Artificial Sequence
  Description of Artificial Sequence: Synthetic peptide
  XENP024434 vhCDR3
DYYGSSPY

SEQ ID NO: 35311 - protein, 16 aa, Artificial Sequence
  Description of Artificial Sequence: Synthetic peptide
  XENP024434 vlCDR1
KSSQSIVHSNGNTYLE

SEQ ID NO: 35312 - protein, 7 aa, Artificial Sequence
  Description of Artificial Sequence: Synthetic peptide
  XENP024434 vlCDR2
KVSNRFS

SEQ ID NO: 35313 - protein, 9 aa, Artificial Sequence
  Description of Artificial Sequence: Synthetic peptide
  XENP024434 vlCDR3
FQGSHVPNT

SEQ ID NO: 35314 - protein, 251 aa, Artificial Sequence
  Description of Artificial Sequence: Synthetic polypeptide
  XENP024435 1C11_H3.187_L3_scFv
QVQLVQSGSELVKPGESVKVSCKASGYTFTHYGINWVRQPPGQGLEWMGWINTYTGEPYYAPGFTERFVFSLDTSQSTAYLQINSLKAEDTAVYYCARDYYGSSPYWGQGTLVTVSSGKPGSGKPGSGKPGSGKPGSDVLMTQSPDSLAVSLGERATINCKSSQSIVHSNGNTYLEWYQQKPGQSPKLLIYKVSNRFSGVPDRFSGSGSGTDFTLTISSLQAEDVAVYYCFQGSHVPNTFGGGTKVEIKGS

SEQ ID NO: 35315 - protein, 117 aa, Artificial Sequence
  Description of Artificial Sequence: Synthetic polypeptide
  VH of XENP024435
QVQLVQSGSELVKPGESVKVSCKASGYTFTHYGINWVRQPPGQGLEWMGWINTYTGEPYYAPGFTERFVFSLDTSQSTAYLQINSLKAEDTAVYYCARDYYGSSPYWGQGTLVTVSS

SEQ ID NO: 35316 - protein, 114 aa, Artificial Sequence; identical to SEQ ID NO: 33651
  Description of Artificial Sequence: Synthetic polypeptide
  VL of XENP024435

SEQ ID NO: 35317 - protein, 5 aa, Artificial Sequence
  Description of Artificial Sequence: Synthetic peptide
  XENP024435 vhCDR1
HYGIN

SEQ ID NO: 35318 - protein, 17 aa, Artificial Sequence
  Description of Artificial Sequence: Synthetic peptide
  XENP024435 vhCDR2
WINTYTGEPYYAPGFTE

SEQ ID NO: 35319 - protein, 8 aa, Artificial Sequence
  Description of Artificial Sequence: Synthetic peptide
  XENP024435 vhCDR3
DYYGSSPY

SEQ ID NO: 35320 - protein, 16 aa, Artificial Sequence
  Description of Artificial Sequence: Synthetic peptide
  XENP024435 vlCDR1
KSSQSIVHSNGNTYLE

SEQ ID NO: 35321 - protein, 7 aa, Artificial Sequence
  Description of Artificial Sequence: Synthetic peptide
  XENP024435 vlCDR2
KVSNRFS

SEQ ID NO: 35322 - protein, 9 aa, Artificial Sequence
  Description of Artificial Sequence: Synthetic peptide
  XENP024435 vlCDR3
FQGSHVPNT

SEQ ID NO: 35323 - protein, 251 aa, Artificial Sequence
  Description of Artificial Sequence: Synthetic polypeptide
  XENP024436 1C11_H3.188_L3_scFv
QVQLVQSGSELKKPGESVKVSCKASGYTFTHYGINWVRQPPGQGLEWIGWINTYTGEPYYAPGFTGRFVFSLDTSQSTAYLQINSLKAEDTAVYYCARDYYGSSPYWGQGTLVTVSSGKPGSGKPGSGKPGSGKPGSDVLMTQSPDSLAVSLGERATINCKSSQSIVHSNGNTYLEWYQQKPGQSPKLLIYKVSNRFSGVPDRFSGSGSGTDFTLTISSLQAEDVAVYYCFQGSHVPNTFGGGTKVEIKGS

SEQ ID NO: 35324 - protein, 117 aa, Artificial Sequence
  Description of Artificial Sequence: Synthetic polypeptide
  VH of XENP024436
QVQLVQSGSELKKPGESVKVSCKASGYTFTHYGINWVRQPPGQGLEWIGWINTYTGEPYYAPGFTGRFVFSLDTSQSTAYLQINSLKAEDTAVYYCARDYYGSSPYWGQGTLVTVSS

SEQ ID NO: 35325 - protein, 114 aa, Artificial Sequence; identical to SEQ ID NO: 33651
  Description of Artificial Sequence: Synthetic polypeptide
  VL of XENP024436

SEQ ID NO: 35326 - protein, 5 aa, Artificial Sequence
  Description of Artificial Sequence: Synthetic peptide
  XENP024436 vhCDR1
HYGIN

SEQ ID NO: 35327 - protein, 17 aa, Artificial Sequence
  Description of Artificial Sequence: Synthetic peptide
  XENP024436 vhCDR2
WINTYTGEPYYAPGFTG

SEQ ID NO: 35328 - protein, 8 aa, Artificial Sequence
  Description of Artificial Sequence: Synthetic peptide
  XENP024436 vhCDR3
DYYGSSPY

SEQ ID NO: 35329 - protein, 16 aa, Artificial Sequence
  Description of Artificial Sequence: Synthetic peptide
  XENP024436 vlCDR1
KSSQSIVHSNGNTYLE

SEQ ID NO: 35330 - protein, 7 aa, Artificial Sequence
  Description of Artificial Sequence: Synthetic peptide
  XENP024436 vlCDR2
KVSNRFS

SEQ ID NO: 35331 - protein, 9 aa, Artificial Sequence
  Description of Artificial Sequence: Synthetic peptide
  XENP024436 vlCDR3
FQGSHVPNT

SEQ ID NO: 35332 - protein, 251 aa, Artificial Sequence
  Description of Artificial Sequence: Synthetic polypeptide
  XENP024437 1C11_H3.189_L3_scFv
QVQLVQSGSELKKPGASVKVSCKASGYTFTHYGINWVRQPPGQGLEWIGWINTYTGEPYYAPKFTGRFVFSLDTSVSTAYLQINSLKAEDTAVYYCARDYYGSSPYWGQGTLVTVSSGKPGSGKPGSGKPGSGKPGSDVLMTQSPDSLAVSLGERATINCKSSQSIVHSNGNTYLEWYQQKPGQSPKLLIYKVSNRFSGVPDRFSGSGSGTDFTLTISSLQAEDVAVYYCFQGSHVPNTFGGGTKVEIKGS

SEQ ID NO: 35333 - protein, 117 aa, Artificial Sequence
  Description of Artificial Sequence: Synthetic polypeptide
  VH of XENP024437
QVQLVQSGSELKKPGASVKVSCKASGYTFTHYGINWVRQPPGQGLEWIGWINTYTGEPYYAPKFTGRFVFSLDTSVSTAYLQINSLKAEDTAVYYCARDYYGSSPYWGQGTLVTVSS

SEQ ID NO: 35334 - protein, 114 aa, Artificial Sequence; identical to SEQ ID NO: 33651
  Description of Artificial Sequence: Synthetic polypeptide
  VL of XENP024437

SEQ ID NO: 35335 - protein, 5 aa, Artificial Sequence
  Description of Artificial Sequence: Synthetic peptide
  XENP024437 vhCDR1
HYGIN

SEQ ID NO: 35336 - protein, 17 aa, Artificial Sequence
  Description of Artificial Sequence: Synthetic peptide
  XENP024437 vhCDR2
WINTYTGEPYYAPKFTG

SEQ ID NO: 35337 - protein, 8 aa, Artificial Sequence
  Description of Artificial Sequence: Synthetic peptide
  XENP024437 vhCDR3
DYYGSSPY

SEQ ID NO: 35338 - protein, 16 aa, Artificial Sequence
  Description of Artificial Sequence: Synthetic peptide
  XENP024437 vlCDR1
KSSQSIVHSNGNTYLE

SEQ ID NO: 35339 - protein, 7 aa, Artificial Sequence
  Description of Artificial Sequence: Synthetic peptide
  XENP024437 vlCDR2
KVSNRFS

SEQ ID NO: 35340 - protein, 9 aa, Artificial Sequence
  Description of Artificial Sequence: Synthetic peptide
  XENP024437 vlCDR3
FQGSHVPNT

SEQ ID NO: 35341 - protein, 251 aa, Artificial Sequence
  Description of Artificial Sequence: Synthetic polypeptide
  XENP024438 1C11_H3.190_L3_scFv
QVQLVQSGSVLKKPGGSVKVSCKASGYTFTHYGINWVRQPPGQGLEWIGWINTYTGEPYYAPGFTGRFVFSLDTSQSTAYLQINSLKAEDTAVYYCARDYYGSSPYWGQGTLVTVSSGKPGSGKPGSGKPGSGKPGSDVLMTQSPDSLAVSLGERATINCKSSQSIVHSNGNTYLEWYQQKPGQSPKLLIYKVSNRFSGVPDRFSGSGSGTDFTLTISSLQAEDVAVYYCFQGSHVPNTFGGGTKVEIKGS

SEQ ID NO: 35342 - protein, 117 aa, Artificial Sequence
  Description of Artificial Sequence: Synthetic polypeptide
  VH of XENP024438
QVQLVQSGSVLKKPGGSVKVSCKASGYTFTHYGINWVRQPPGQGLEWIGWINTYTGEPYYAPGFTGRFVFSLDTSQSTAYLQINSLKAEDTAVYYCARDYYGSSPYWGQGTLVTVSS

SEQ ID NO: 35343 - protein, 114 aa, Artificial Sequence; identical to SEQ ID NO: 33651
  Description of Artificial Sequence: Synthetic polypeptide
  VL of XENP024438

SEQ ID NO: 35344 - protein, 5 aa, Artificial Sequence
  Description of Artificial Sequence: Synthetic peptide
  XENP024438 vhCDR1
HYGIN

SEQ ID NO: 35345 - protein, 17 aa, Artificial Sequence
  Description of Artificial Sequence: Synthetic peptide
  XENP024438 vhCDR2
WINTYTGEPYYAPGFTG

SEQ ID NO: 35346 - protein, 8 aa, Artificial Sequence
  Description of Artificial Sequence: Synthetic peptide
  XENP024438 vhCDR3
DYYGSSPY

SEQ ID NO: 35347 - protein, 16 aa, Artificial Sequence
  Description of Artificial Sequence: Synthetic peptide
  XENP024438 vlCDR1
KSSQSIVHSNGNTYLE

SEQ ID NO: 35348 - protein, 7 aa, Artificial Sequence
  Description of Artificial Sequence: Synthetic peptide
  XENP024438 vlCDR2
KVSNRFS

SEQ ID NO: 35349 - protein, 9 aa, Artificial Sequence
  Description of Artificial Sequence: Synthetic peptide
  XENP024438 vlCDR3
FQGSHVPNT

SEQ ID NO: 35350 - protein, 251 aa, Artificial Sequence
  Description of Artificial Sequence: Synthetic polypeptide
  XENP024439 1C11_H3.191_L3_scFv
QVQLVQSGSELVKPGESVKVSCKASGYTFTHYGMNWVRQAPGQGLEWMGWINTYTGEPTYAPGFTGRFVFSLDTSQSTAYLQINSLKAEDTAVYFCARDYYGSSPYWGQGTLVTVSSGKPGSGKPGSGKPGSGKPGSDVLMTQSPDSLAVSLGERATINCKSSQSIVHSNGNTYLEWYQQKPGQSPKLLIYKVSNRFSGVPDRFSGSGSGTDFTLTISSLQAEDVAVYYCFQGSHVPNTFGGGTKVEIKGS

SEQ ID NO: 35351 - protein, 117 aa, Artificial Sequence
  Description of Artificial Sequence: Synthetic polypeptide
  VH of XENP024439
QVQLVQSGSELVKPGESVKVSCKASGYTFTHYGMNWVRQAPGQGLEWMGWINTYTGEPTYAPGFTGRFVFSLDTSQSTAYLQINSLKAEDTAVYFCARDYYGSSPYWGQGTLVTVSS

SEQ ID NO: 35352 - protein, 114 aa, Artificial Sequence; identical to SEQ ID NO: 33651
  Description of Artificial Sequence: Synthetic polypeptide
  VL of XENP024439

SEQ ID NO: 35353 - protein, 5 aa, Artificial Sequence
  Description of Artificial Sequence: Synthetic peptide
  XENP024439 vhCDR1
HYGMN

SEQ ID NO: 35354 - protein, 17 aa, Artificial Sequence
  Description of Artificial Sequence: Synthetic peptide
  XENP024439 vhCDR2
WINTYTGEPTYAPGFTG

SEQ ID NO: 35355 - protein, 8 aa, Artificial Sequence
  Description of Artificial Sequence: Synthetic peptide
  XENP024439 vhCDR3
DYYGSSPY

SEQ ID NO: 35356 - protein, 16 aa, Artificial Sequence
  Description of Artificial Sequence: Synthetic peptide
  XENP024439 vlCDR1
KSSQSIVHSNGNTYLE

SEQ ID NO: 35357 - protein, 7 aa, Artificial Sequence
  Description of Artificial Sequence: Synthetic peptide
  XENP024439 vlCDR2
KVSNRFS

SEQ ID NO: 35358 - protein, 9 aa, Artificial Sequence
  Description of Artificial Sequence: Synthetic peptide
  XENP024439 vlCDR3
FQGSHVPNT

SEQ ID NO: 35359 - protein, 251 aa, Artificial Sequence
  Description of Artificial Sequence: Synthetic polypeptide
  XENP024440 1C11_H3.192_L3_scFv
EVQLVQSGSVLKKPGESVKVSCKASGYTFTHYGINWVRQAPGQGLEWMGWINTYTGEPTYADGFTERFVFSLDTSVSTAYLQISSLKAEDTAVYFCARDYYGSSPYWGQGTLVTVSSGKPGSGKPGSGKPGSGKPGSDVLMTQSPDSLAVSLGERATINCKSSQSIVHSNGNTYLEWYQQKPGQSPKLLIYKVSNRFSGVPDRFSGSGSGTDFTLTISSLQAEDVAVYYCFQGSHVPNTFGGGTKVEIKGS

SEQ ID NO: 35360 - protein, 117 aa, Artificial Sequence
  Description of Artificial Sequence: Synthetic polypeptide
  VH of XENP024440
EVQLVQSGSVLKKPGESVKVSCKASGYTFTHYGINWVRQAPGQGLEWMGWINTYTGEPTYADGFTERFVFSLDTSVSTAYLQISSLKAEDTAVYFCARDYYGSSPYWGQGTLVTVSS

SEQ ID NO: 35361 - protein, 114 aa, Artificial Sequence; identical to SEQ ID NO: 33651
  Description of Artificial Sequence: Synthetic polypeptide
  VL of XENP024440

SEQ ID NO: 35362 - protein, 5 aa, Artificial Sequence
  Description of Artificial Sequence: Synthetic peptide
  XENP024440 vhCDR1
HYGIN

SEQ ID NO: 35363 - protein, 17 aa, Artificial Sequence
  Description of Artificial Sequence: Synthetic peptide
  XENP024440 vhCDR2
WINTYTGEPTYADGFTE

SEQ ID NO: 35364 - protein, 8 aa, Artificial Sequence
  Description of Artificial Sequence: Synthetic peptide
  XENP024440 vhCDR3
DYYGSSPY

SEQ ID NO: 35365 - protein, 16 aa, Artificial Sequence
  Description of Artificial Sequence: Synthetic peptide
  XENP024440 vlCDR1
KSSQSIVHSNGNTYLE

SEQ ID NO: 35366 - protein, 7 aa, Artificial Sequence
  Description of Artificial Sequence: Synthetic peptide
  XENP024440 vlCDR2
KVSNRFS

SEQ ID NO: 35367 - protein, 9 aa, Artificial Sequence
  Description of Artificial Sequence: Synthetic peptide
  XENP024440 vlCDR3
FQGSHVPNT

SEQ ID NO: 35368 - protein, 251 aa, Artificial Sequence
  Description of Artificial Sequence: Synthetic polypeptide
  XENP024441 1C11_H3.193_L3_scFv
QIQLVQSGSELKKPGASVKVSCKASGYTFTHYGMNWVRQPPGQGLEWIGWINTYTGEPTYAPGFTERFVFSLDTSQSTAYLQINSLKAEDTAVYYCARDYYGSSPYWGQGTLVTVSSGKPGSGKPGSGKPGSGKPGSDVLMTQSPDSLAVSLGERATINCKSSQSIVHSNGNTYLEWYQQKPGQSPKLLIYKVSNRFSGVPDRFSGSGSGTDFTLTISSLQAEDVAVYYCFQGSHVPNTFGGGTKVEIKGS

SEQ ID NO: 35369 - protein, 117 aa, Artificial Sequence
  Description of Artificial Sequence: Synthetic polypeptide
  VH of XENP024441
QIQLVQSGSELKKPGASVKVSCKASGYTFTHYGMNWVRQPPGQGLEWIGWINTYTGEPTYAPGFTERFVFSLDTSQSTAYLQINSLKAEDTAVYYCARDYYGSSPYWGQGTLVTVSS

SEQ ID NO: 35370 - protein, 114 aa, Artificial Sequence; identical to SEQ ID NO: 33651
  Description of Artificial Sequence: Synthetic polypeptide
  VL of XENP024441

SEQ ID NO: 35371 - protein, 5 aa, Artificial Sequence
  Description of Artificial Sequence: Synthetic peptide
  XENP024441 vhCDR1
HYGMN

SEQ ID NO: 35372 - protein, 17 aa, Artificial Sequence
  Description of Artificial Sequence: Synthetic peptide
  XENP024441 vhCDR2
WINTYTGEPTYAPGFTE

SEQ ID NO: 35373 - protein, 8 aa, Artificial Sequence
  Description of Artificial Sequence: Synthetic peptide
  XENP024441 vhCDR3
DYYGSSPY

SEQ ID NO: 35374 - protein, 16 aa, Artificial Sequence
  Description of Artificial Sequence: Synthetic peptide
  XENP024441 vlCDR1
KSSQSIVHSNGNTYLE

SEQ ID NO: 35375 - protein, 7 aa, Artificial Sequence
  Description of Artificial Sequence: Synthetic peptide
  XENP024441 vlCDR2
KVSNRFS

SEQ ID NO: 35376 - protein, 9 aa, Artificial Sequence
  Description of Artificial Sequence: Synthetic peptide
  XENP024441 vlCDR3
FQGSHVPNT

SEQ ID NO: 35377 - protein, 251 aa, Artificial Sequence
  Description of Artificial Sequence: Synthetic polypeptide
  XENP024442 1C11_H3.194_L3_scFv
EIQLVQSGSVLKKPGASVKVSCKASGYTFTHYGINWVRQAPGQGLEWIGWINTYTGEPTYADGFTGRFVFSLDTSVSTAYLQISSLKAEDTAVYFCARDYYGSSPYWGQGTLVTVSSGKPGSGKPGSGKPGSGKPGSDVLMTQSPDSLAVSLGERATINCKSSQSIVHSNGNTYLEWYQQKPGQSPKLLIYKVSNRFSGVPDRFSGSGSGTDFTLTISSLQAEDVAVYYCFQGSHVPNTFGGGTKVEIKGS

SEQ ID NO: 35378 - protein, 117 aa, Artificial Sequence
  Description of Artificial Sequence: Synthetic polypeptide
  VH of XENP024442
EIQLVQSGSVLKKPGASVKVSCKASGYTFTHYGINWVRQAPGQGLEWIGWINTYTGEPTYADGFTGRFVFSLDTSVSTAYLQISSLKAEDTAVYFCARDYYGSSPYWGQGTLVTVSS

SEQ ID NO: 35379 - protein, 114 aa, Artificial Sequence; identical to SEQ ID NO: 33651
  Description of Artificial Sequence: Synthetic polypeptide
  VL of XENP024442

SEQ ID NO: 35380 - protein, 5 aa, Artificial Sequence
  Description of Artificial Sequence: Synthetic peptide
  XENP024442 vhCDR1
HYGIN

SEQ ID NO: 35381 - protein, 17 aa, Artificial Sequence
  Description of Artificial Sequence: Synthetic peptide
  XENP024442 vhCDR2
WINTYTGEPTYADGFTG

SEQ ID NO: 35382 - protein, 8 aa, Artificial Sequence
  Description of Artificial Sequence: Synthetic peptide
  XENP024442 vhCDR3
DYYGSSPY

SEQ ID NO: 35383 - protein, 16 aa, Artificial Sequence
  Description of Artificial Sequence: Synthetic peptide
  XENP024442 vlCDR1
KSSQSIVHSNGNTYLE

SEQ ID NO: 35384 - protein, 7 aa, Artificial Sequence
  Description of Artificial Sequence: Synthetic peptide
  XENP024442 vlCDR2
KVSNRFS

SEQ ID NO: 35385 - protein, 9 aa, Artificial Sequence
  Description of Artificial Sequence: Synthetic peptide
  XENP024442 vlCDR3
FQGSHVPNT

SEQ ID NO: 35386 - protein, 251 aa, Artificial Sequence
  Description of Artificial Sequence: Synthetic polypeptide
  XENP024443 1C11_H3.195_L3_scFv
QIQLVQSGSELKKPGASVKVSCKASGYTFTHYGMNWVRQPPGQGLEWMGWINTYTGEPYYADGFTGRFVFSLDTSVDTAYLQINSLKAEDTAVYFCARDYYGSSPYWGQGTLVTVSSGKPGSGKPGSGKPGSGKPGSDVLMTQSPDSLAVSLGERATINCKSSQSIVHSNGNTYLEWYQQKPGQSPKLLIYKVSNRFSGVPDRFSGSGSGTDFTLTISSLQAEDVAVYYCFQGSHVPNTFGGGTKVEIKGS

SEQ ID NO: 35387 - protein, 117 aa, Artificial Sequence
  Description of Artificial Sequence: Synthetic polypeptide
  VH of XENP024443
QIQLVQSGSELKKPGASVKVSCKASGYTFTHYGMNWVRQPPGQGLEWMGWINTYTGEPYYADGFTGRFVFSLDTSVDTAYLQINSLKAEDTAVYFCARDYYGSSPYWGQGTLVTVSS

SEQ ID NO: 35388 - protein, 114 aa, Artificial Sequence; identical to SEQ ID NO: 33651
  Description of Artificial Sequence: Synthetic polypeptide
  VL of XENP024443

SEQ ID NO: 35389 - protein, 5 aa, Artificial Sequence
  Description of Artificial Sequence: Synthetic peptide
  XENP024443 vhCDR1
HYGMN

SEQ ID NO: 35390 - protein, 17 aa, Artificial Sequence
  Description of Artificial Sequence: Synthetic peptide
  XENP024443 vhCDR2
WINTYTGEPYYADGFTG

SEQ ID NO: 35391 - protein, 8 aa, Artificial Sequence
  Description of Artificial Sequence: Synthetic peptide
  XENP024443 vhCDR3
DYYGSSPY

SEQ ID NO: 35392 - protein, 16 aa, Artificial Sequence
  Description of Artificial Sequence: Synthetic peptide
  XENP024443 vlCDR1
KSSQSIVHSNGNTYLE

SEQ ID NO: 35393 - protein, 7 aa, Artificial Sequence
  Description of Artificial Sequence: Synthetic peptide
  XENP024443 vlCDR2
KVSNRFS

SEQ ID NO: 35394 - protein, 9 aa, Artificial Sequence
  Description of Artificial Sequence: Synthetic peptide
  XENP024443 vlCDR3
FQGSHVPNT

SEQ ID NO: 35395 - protein, 231 aa, Artificial Sequence
  Description of Artificial Sequence: Synthetic polypeptide
  XENP022835 empty-[CTLA-4]_H3.23_L0.129_scFv Empty-Fc Heavy Chain
EPKSSDKTHTCPPCPAPPVAGPSVFLFPPKPKDTLMISRTPEVTCVVVDVKHEDPEVKFNWYVDGVEVHNAKTKPREEEYNSTYRVVSVLTVLHQDWLNGKEYKCKVSNKALPAPIEKTISKAKGQPREPQVYTLPPSREEMTKNQVSLTCDVSGFYPSDIAVEWESDGQPENNYKTTPPVLDSDGSFFLYSKLTVDKSRWEQGDVFSCSVMHEALHNHYTQKSLSLSPGK

SEQ ID NO: 35396 - protein, 477 aa, Artificial Sequence; identical to SEQ ID NO: 21669
  Description of Artificial Sequence: Synthetic polypeptide
  XENP022835 empty-[CTLA-4]_H3.23_L0.129_scFv scFv-Fc Heavy Chain

SEQ ID NO: 35397 - protein, 118 aa, Artificial Sequence; identical to SEQ ID NO: 2632
  Description of Artificial Sequence: Synthetic polypeptide
  VH of XENP022835

SEQ ID NO: 35398 - protein, 108 aa, Artificial Sequence; identical to SEQ ID NO: 2768
  Description of Artificial Sequence: Synthetic polypeptide
  VL of XENP022835

SEQ ID NO: 35399 - protein, 231 aa, Artificial Sequence; identical to SEQ ID NO: 21532
  Description of Artificial Sequence: Synthetic polypeptide
  Fc chain of XENP022835

SEQ ID NO: 35400 - protein, 5 aa, Artificial Sequence
  Description of Artificial Sequence: Synthetic peptide
  XENP022835 vhCDR1
SYTMH

SEQ ID NO: 35401 - protein, 17 aa, Artificial Sequence
  Description of Artificial Sequence: Synthetic peptide
  XENP022835 vhCDR2
FISYDGNYKYYADSVKG

SEQ ID NO: 35402 - protein, 9 aa, Artificial Sequence
  Description of Artificial Sequence: Synthetic peptide
  XENP022835 vhCDR3
GGHLGPFDL

SEQ ID NO: 35403 - protein, 12 aa, Artificial Sequence
  Description of Artificial Sequence: Synthetic peptide
  XENP022835 vlCDR1
RASQSVGSSYLA

SEQ ID NO: 35404 - protein, 7 aa, Artificial Sequence
  Description of Artificial Sequence: Synthetic peptide
  XENP022835 vlCDR2
GASSRAT

SEQ ID NO: 35405 - protein, 9 aa, Artificial Sequence
  Description of Artificial Sequence: Synthetic peptide
  XENP022835 vlCDR3
QQYGSSPWT

SEQ ID NO: 35406 - protein, 447 aa, Artificial Sequence; identical to SEQ ID NO: 23556
  Description of Artificial Sequence: Synthetic polypeptide
  XENP023552 [CTLA-4]_H3_L0.22_Fab-empty_Fc(216)_IgG1 Fab-Fc Heavy Chain

SEQ ID NO: 35407 - protein, 118 aa, Artificial Sequence; identical to SEQ ID NO: 139
  Description of Artificial Sequence: Synthetic polypeptide
  VH of XENP023552

SEQ ID NO: 35408 - protein, 5 aa, Artificial Sequence
  Description of Artificial Sequence: Synthetic peptide
  XENP023552 vhCDR1
SYTMH

SEQ ID NO: 35409 - protein, 17 aa, Artificial Sequence
  Description of Artificial Sequence: Synthetic peptide
  XENP023552 vhCDR2
FISYDGNNKYYADSVKG

SEQ ID NO: 35410 - protein, 9 aa, Artificial Sequence
  Description of Artificial Sequence: Synthetic peptide
  XENP023552 vhCDR3
TGWLGPFDY

SEQ ID NO: 35411 - protein, 231 aa, Artificial Sequence; identical to SEQ ID NO: 21572
  Description of Artificial Sequence: Synthetic polypeptide
  XENP023552 [CTLA-4]_H3_L0.22_Fab-empty_Fc(216)_IgG1 Empty-Fc Heavy Chain

SEQ ID NO: 35412 - protein, 215 aa, Artificial Sequence; identical to SEQ ID NO: 4504
  Description of Artificial Sequence: Synthetic polypeptide
  XENP023552 [CTLA-4]_H3_L0.22_Fab-empty_Fc(216)_IgG1 Light Chain

SEQ ID NO: 35413 - protein, 108 aa, Artificial Sequence; identical to SEQ ID NO: 1607
  Description of Artificial Sequence: Synthetic polypeptide
  VL of XENP023552

SEQ ID NO: 35414 - protein, 12 aa, Artificial Sequence
  Description of Artificial Sequence: Synthetic peptide
  XENP023552 vlCDR1
RASQSVSSSYLA

SEQ ID NO: 35415 - protein, 7 aa, Artificial Sequence
  Description of Artificial Sequence: Synthetic peptide
  XENP023552 vlCDR2
GAFSRAT

SEQ ID NO: 35416 - protein, 9 aa, Artificial Sequence
  Description of Artificial Sequence: Synthetic peptide
  XENP023552 vlCDR3
QQYGSSPWT

SEQ ID NO: 35417 - protein, 226 aa, Artificial Sequence
  Description of Artificial Sequence: Synthetic polypeptide
  XENP023041 7G8_H3.66_L1.34_Fab Heavy Chain
EVQLVESGGGLVQPGGSLRLSCAASGFTFDEAWMSWVRQAPGKGLEWVAEISTKANNHATYYAESVKGRFTISRDDSKSSVYLQMNSLRAEDTAVYYCTRLATWDWYFDVWGQGTTVTVSSASTKGPSVFPLAPSSKSTSGGTAALGCLVKDYFPEPVTVSWNSGALTSGVHTFPAVLQSSGLYSLSSVVTVPSSSLGTQTYICNVNHKPSNTKVDKKVEPKSCGS

SEQ ID NO: 35418 - protein, 121 aa, Artificial Sequence
  Description of Artificial Sequence: Synthetic polypeptide
  VH of XENP023041
EVQLVESGGGLVQPGGSLRLSCAASGFTFDEAWMSWVRQAPGKGLEWVAEISTKANNHATYYAESVKGRFTISRDDSKSSVYLQMNSLRAEDTAVYYCTRLATWDWYFDVWGQGTTVTVSS

SEQ ID NO: 35419 - protein, 5 aa, Artificial Sequence
  Description of Artificial Sequence: Synthetic peptide
  XENP023041 vhCDR1
EAWMS

SEQ ID NO: 35420 - protein, 19 aa, Artificial Sequence
  Description of Artificial Sequence: Synthetic peptide
  XENP023041 vhCDR2
EISTKANNHATYYAESVKG

SEQ ID NO: 35421 - protein, 10 aa, Artificial Sequence
  Description of Artificial Sequence: Synthetic peptide
  XENP023041 vhCDR3
LATWDWYFDV

SEQ ID NO: 35422 - protein, 218 aa, Artificial Sequence; identical to SEQ ID NO: 22599
  Description of Artificial Sequence: Synthetic polypeptide
  XENP023041 7G8_H3.66_L1.34_Fab Light Chain

SEQ ID NO: 35423 - protein, 111 aa, Artificial Sequence; identical to SEQ ID NO: 22600
  Description of Artificial Sequence: Synthetic polypeptide
  VL of XENP023041

SEQ ID NO: 35424 - protein, 15 aa, Artificial Sequence
  Description of Artificial Sequence: Synthetic peptide
  XENP023041 vlCDR1
RASQSVDYDGDSYMN

SEQ ID NO: 35425 - protein, 7 aa, Artificial Sequence
  Description of Artificial Sequence: Synthetic peptide
  XENP023041 vlCDR2
AASELES

SEQ ID NO: 35426 - protein, 9 aa, Artificial Sequence
  Description of Artificial Sequence: Synthetic peptide
  XENP023041 vlCDR3
QQSNEDPFT

SEQ ID NO: 35427 - protein, 226 aa, Artificial Sequence
  Description of Artificial Sequence: Synthetic polypeptide
  XENP023042 7G8_H3.67_L1.34_Fab Heavy Chain
EVQLVESGGGLVQPGGSLRLSCAASGFTFDDTWMSWVRQAPGKGLEWVAEISTKANNHATYYAESVKGRFTISRDDSKSSVYLQMNSLRAEDTAVYYCTRLATWDWYFDVWGQGTTVTVSSASTKGPSVFPLAPSSKSTSGGTAALGCLVKDYFPEPVTVSWNSGALTSGVHTFPAVLQSSGLYSLSSVVTVPSSSLGTQTYICNVNHKPSNTKVDKKVEPKSCGS

SEQ ID NO: 35428 - protein, 121 aa, Artificial Sequence
  Description of Artificial Sequence: Synthetic polypeptide
  VH of XENP023042
EVQLVESGGGLVQPGGSLRLSCAASGFTFDDTWMSWVRQAPGKGLEWVAEISTKANNHATYYAESVKGRFTISRDDSKSSVYLQMNSLRAEDTAVYYCTRLATWDWYFDVWGQGTTVTVSS

SEQ ID NO: 35429 - protein, 5 aa, Artificial Sequence
  Description of Artificial Sequence: Synthetic peptide
  XENP023042 vhCDR1
DTWMS

SEQ ID NO: 35430 - protein, 19 aa, Artificial Sequence
  Description of Artificial Sequence: Synthetic peptide
  XENP023042 vhCDR2
EISTKANNHATYYAESVKG

SEQ ID NO: 35431 - protein, 10 aa, Artificial Sequence
  Description of Artificial Sequence: Synthetic peptide
  XENP023042 vhCDR3
LATWDWYFDV

SEQ ID NO: 35432 - protein, 218 aa, Artificial Sequence; identical to SEQ ID NO: 22599
  Description of Artificial Sequence: Synthetic polypeptide
  XENP023042 7G8_H3.67_L1.34_Fab Light Chain

SEQ ID NO: 35433 - protein, 111 aa, Artificial Sequence; identical to SEQ ID NO: 22600
  Description of Artificial Sequence: Synthetic polypeptide
  VL of XENP023042

SEQ ID NO: 35434 - protein, 15 aa, Artificial Sequence
  Description of Artificial Sequence: Synthetic peptide
  XENP023042 vlCDR1
RASQSVDYDGDSYMN

SEQ ID NO: 35435 - protein, 7 aa, Artificial Sequence
  Description of Artificial Sequence: Synthetic peptide
  XENP023042 vlCDR2
AASELES

SEQ ID NO: 35436 - protein, 9 aa, Artificial Sequence
  Description of Artificial Sequence: Synthetic peptide
  XENP023042 vlCDR3
QQSNEDPFT

SEQ ID NO: 35437 - protein, 226 aa, Artificial Sequence
  Description of Artificial Sequence: Synthetic polypeptide
  XENP023043 7G8_H3.68_L1.34_Fab Heavy Chain
EVQLVESGGGLVQPGGSLRLSCAASGFTFDDKWMSWVRQAPGKGLEWVAEISTKANNHATYYAESVKGRFTISRDDSKSSVYLQMNSLRAEDTAVYYCTRLATWDWYFDVWGQGTTVTVSSASTKGPSVFPLAPSSKSTSGGTAALGCLVKDYFPEPVTVSWNSGALTSGVHTFPAVLQSSGLYSLSSVVTVPSSSLGTQTYICNVNHKPSNTKVDKKVEPKSCGS

SEQ ID NO: 35438 - protein, 121 aa, Artificial Sequence
  Description of Artificial Sequence: Synthetic polypeptide
  VH of XENP023043
EVQLVESGGGLVQPGGSLRLSCAASGFTFDDKWMSWVRQAPGKGLEWVAEISTKANNHATYYAESVKGRFTISRDDSKSSVYLQMNSLRAEDTAVYYCTRLATWDWYFDVWGQGTTVTVSS

SEQ ID NO: 35439 - protein, 5 aa, Artificial Sequence
  Description of Artificial Sequence: Synthetic peptide
  XENP023043 vhCDR1
DKWMS

SEQ ID NO: 35440 - protein, 19 aa, Artificial Sequence
  Description of Artificial Sequence: Synthetic peptide
  XENP023043 vhCDR2
EISTKANNHATYYAESVKG

SEQ ID NO: 35441 - protein, 10 aa, Artificial Sequence
  Description of Artificial Sequence: Synthetic peptide
  XENP023043 vhCDR3
LATWDWYFDV

SEQ ID NO: 35442 - protein, 218 aa, Artificial Sequence; identical to SEQ ID NO: 22599
  Description of Artificial Sequence: Synthetic polypeptide
  XENP023043 7G8_H3.68_L1.34_Fab Light Chain

SEQ ID NO: 35443 - protein, 111 aa, Artificial Sequence; identical to SEQ ID NO: 22600
  Description of Artificial Sequence: Synthetic polypeptide
  VL of XENP023043

SEQ ID NO: 35444 - protein, 15 aa, Artificial Sequence
  Description of Artificial Sequence: Synthetic peptide
  XENP023043 vlCDR1
RASQSVDYDGDSYMN

SEQ ID NO: 35445 - protein, 7 aa, Artificial Sequence
  Description of Artificial Sequence: Synthetic peptide
  XENP023043 vlCDR2
AASELES

SEQ ID NO: 35446 - protein, 9 aa, Artificial Sequence
  Description of Artificial Sequence: Synthetic peptide
  XENP023043 vlCDR3
QQSNEDPFT

SEQ ID NO: 35447 - protein, 226 aa, Artificial Sequence
  Description of Artificial Sequence: Synthetic polypeptide
  XENP023044 7G8_H3.69_L1.34_Fab Heavy Chain
EVQLVESGGGLVQPGGSLRLSCAASGFTFDDAFMSWVRQAPGKGLEWVAEISTKANNHATYYAESVKGRFTISRDDSKSSVYLQMNSLRAEDTAVYYCTRLATWDWYFDVWGQGTTVTVSSASTKGPSVFPLAPSSKSTSGGTAALGCLVKDYFPEPVTVSWNSGALTSGVHTFPAVLQSSGLYSLSSVVTVPSSSLGTQTYICNVNHKPSNTKVDKKVEPKSCGS

SEQ ID NO: 35448 - protein, 121 aa, Artificial Sequence
  Description of Artificial Sequence: Synthetic polypeptide
  VH of XENP023044
EVQLVESGGGLVQPGGSLRLSCAASGFTFDDAFMSWVRQAPGKGLEWVAEISTKANNHATYYAESVKGRFTISRDDSKSSVYLQMNSLRAEDTAVYYCTRLATWDWYFDVWGQGTTVTVSS

SEQ ID NO: 35449 - protein, 5 aa, Artificial Sequence
  Description of Artificial Sequence: Synthetic peptide
  XENP023044 vhCDR1
DAFMS

SEQ ID NO: 35450 - protein, 19 aa, Artificial Sequence
  Description of Artificial Sequence: Synthetic peptide
  XENP023044 vhCDR2
EISTKANNHATYYAESVKG

SEQ ID NO: 35451 - protein, 10 aa, Artificial Sequence
  Description of Artificial Sequence: Synthetic peptide
  XENP023044 vhCDR3
LATWDWYFDV

SEQ ID NO: 35452 - protein, 218 aa, Artificial Sequence; identical to SEQ ID NO: 22599
  Description of Artificial Sequence: Synthetic polypeptide
  XENP023044 7G8_H3.69_L1.34_Fab Light Chain

SEQ ID NO: 35453 - protein, 111 aa, Artificial Sequence; identical to SEQ ID NO: 22600
  Description of Artificial Sequence: Synthetic polypeptide
  VL of XENP023044

SEQ ID NO: 35454 - protein, 15 aa, Artificial Sequence
  Description of Artificial Sequence: Synthetic peptide
  XENP023044 vlCDR1
RASQSVDYDGDSYMN

SEQ ID NO: 35455 - protein, 7 aa, Artificial Sequence
  Description of Artificial Sequence: Synthetic peptide
  XENP023044 vlCDR2
AASELES

SEQ ID NO: 35456 - protein, 9 aa, Artificial Sequence
  Description of Artificial Sequence: Synthetic peptide
  XENP023044 vlCDR3
QQSNEDPFT

SEQ ID NO: 35457 - protein, 226 aa, Artificial Sequence
  Description of Artificial Sequence: Synthetic polypeptide
  XENP023045 7G8_H3.70_L1.34_Fab Heavy Chain
EVQLVESGGGLVQPGGSLRLSCAASGFTFDDAYMSWVRQAPGKGLEWVAEISTKANNHATYYAESVKGRFTISRDDSKSSVYLQMNSLRAEDTAVYYCTRLATWDWYFDVWGQGTTVTVSSASTKGPSVFPLAPSSKSTSGGTAALGCLVKDYFPEPVTVSWNSGALTSGVHTFPAVLQSSGLYSLSSVVTVPSSSLGTQTYICNVNHKPSNTKVDKKVEPKSCGS

SEQ ID NO: 35458 - protein, 121 aa, Artificial Sequence
  Description of Artificial Sequence: Synthetic polypeptide
  VH of XENP023045
EVQLVESGGGLVQPGGSLRLSCAASGFTFDDAYMSWVRQAPGKGLEWVAEISTKANNHATYYAESVKGRFTISRDDSKSSVYLQMNSLRAEDTAVYYCTRLATWDWYFDVWGQGTTVTVSS

SEQ ID NO: 35459 - protein, 5 aa, Artificial Sequence
  Description of Artificial Sequence: Synthetic peptide
  XENP023045 vhCDR1
DAYMS

SEQ ID NO: 35460 - protein, 19 aa, Artificial Sequence
  Description of Artificial Sequence: Synthetic peptide
  XENP023045 vhCDR2
EISTKANNHATYYAESVKG

SEQ ID NO: 35461 - protein, 10 aa, Artificial Sequence
  Description of Artificial Sequence: Synthetic peptide
  XENP023045 vhCDR3
LATWDWYFDV

SEQ ID NO: 35462 - protein, 218 aa, Artificial Sequence; identical to SEQ ID NO: 22599
  Description of Artificial Sequence: Synthetic polypeptide
  XENP023045 7G8_H3.70_L1.34_Fab Light Chain

SEQ ID NO: 35463 - protein, 111 aa, Artificial Sequence; identical to SEQ ID NO: 22600
  Description of Artificial Sequence: Synthetic polypeptide
  VL of XENP023045

SEQ ID NO: 35464 - protein, 15 aa, Artificial Sequence
  Description of Artificial Sequence: Synthetic peptide
  XENP023045 vlCDR1
RASQSVDYDGDSYMN

SEQ ID NO: 35465 - protein, 7 aa, Artificial Sequence
  Description of Artificial Sequence: Synthetic peptide
  XENP023045 vlCDR2
AASELES

SEQ ID NO: 35466 - protein, 9 aa, Artificial Sequence
  Description of Artificial Sequence: Synthetic peptide
  XENP023045 vlCDR3
QQSNEDPFT

SEQ ID NO: 35467 - protein, 226 aa, Artificial Sequence
  Description of Artificial Sequence: Synthetic polypeptide
  XENP023046 7G8_H3.71_L1.34_Fab Heavy Chain
EVQLVESGGGLVQPGGSLRLSCAASGFTFDDAWMSWVRQAPGKGLEWVAEISTKAYNHATYYAESVKGRFTISRDDSKSSVYLQMNSLRAEDTAVYYCTRLATWDWYFDVWGQGTTVTVSSASTKGPSVFPLAPSSKSTSGGTAALGCLVKDYFPEPVTVSWNSGALTSGVHTFPAVLQSSGLYSLSSVVTVPSSSLGTQTYICNVNHKPSNTKVDKKVEPKSCGS

SEQ ID NO: 35468 - protein, 121 aa, Artificial Sequence
  Description of Artificial Sequence: Synthetic polypeptide
  VH of XENP023046
EVQLVESGGGLVQPGGSLRLSCAASGFTFDDAWMSWVRQAPGKGLEWVAEISTKAYNHATYYAESVKGRFTISRDDSKSSVYLQMNSLRAEDTAVYYCTRLATWDWYFDVWGQGTTVTVSS

SEQ ID NO: 35469 - protein, 5 aa, Artificial Sequence
  Description of Artificial Sequence: Synthetic peptide
  XENP023046 vhCDR1
DAWMS

SEQ ID NO: 35470 - protein, 19 aa, Artificial Sequence
  Description of Artificial Sequence: Synthetic peptide
  XENP023046 vhCDR2
EISTKAYNHATYYAESVKG

SEQ ID NO: 35471 - protein, 10 aa, Artificial Sequence
  Description of Artificial Sequence: Synthetic peptide
  XENP023046 vhCDR3
LATWDWYFDV

SEQ ID NO: 35472 - protein, 218 aa, Artificial Sequence; identical to SEQ ID NO: 22599
  Description of Artificial Sequence: Synthetic polypeptide
  XENP023046 7G8_H3.71_L1.34_Fab Light Chain

SEQ ID NO: 35473 - protein, 111 aa, Artificial Sequence; identical to SEQ ID NO: 22600
  Description of Artificial Sequence: Synthetic polypeptide
  VL of XENP023046

SEQ ID NO: 35474 - protein, 15 aa, Artificial Sequence
  Description of Artificial Sequence: Synthetic peptide
  XENP023046 vlCDR1
RASQSVDYDGDSYMN

SEQ ID NO: 35475 - protein, 7 aa, Artificial Sequence
  Description of Artificial Sequence: Synthetic peptide
  XENP023046 vlCDR2
AASELES

SEQ ID NO: 35476 - protein, 9 aa, Artificial Sequence
  Description of Artificial Sequence: Synthetic peptide
  XENP023046 vlCDR3
QQSNEDPFT

SEQ ID NO: 35477 - protein, 226 aa, Artificial Sequence
  Description of Artificial Sequence: Synthetic polypeptide
  XENP023047 7G8_H3.72_L1.34_Fab Heavy Chain
EVQLVESGGGLVQPGGSLRLSCAASGFTFDDAWMSWVRQAPGKGLEWVAEISTKANNHATYYAESVKGRFTISRDDSKSSVYLQMNSLRAEDTAVYYCTRLATFDWYFDVWGQGTTVTVSSASTKGPSVFPLAPSSKSTSGGTAALGCLVKDYFPEPVTVSWNSGALTSGVHTFPAVLQSSGLYSLSSVVTVPSSSLGTQTYICNVNHKPSNTKVDKKVEPKSCGS

SEQ ID NO: 35478 - protein, 121 aa, Artificial Sequence
  Description of Artificial Sequence: Synthetic polypeptide
  VH of XENP023047
EVQLVESGGGLVQPGGSLRLSCAASGFTFDDAWMSWVRQAPGKGLEWVAEISTKANNHATYYAESVKGRFTISRDDSKSSVYLQMNSLRAEDTAVYYCTRLATFDWYFDVWGQGTTVTVSS

SEQ ID NO: 35479 - protein, 5 aa, Artificial Sequence
  Description of Artificial Sequence: Synthetic peptide
  XENP023047 vhCDR1
DAWMS

SEQ ID NO: 35480 - protein, 19 aa, Artificial Sequence
  Description of Artificial Sequence: Synthetic peptide
  XENP023047 vhCDR2
EISTKANNHATYYAESVKG

SEQ ID NO: 35481 - protein, 10 aa, Artificial Sequence
  Description of Artificial Sequence: Synthetic peptide
  XENP023047 vhCDR3
LATFDWYFDV

SEQ ID NO: 35482 - protein, 218 aa, Artificial Sequence; identical to SEQ ID NO: 22599
  Description of Artificial Sequence: Synthetic polypeptide
  XENP023047 7G8_H3.72_L1.34_Fab Light Chain

SEQ ID NO: 35483 - protein, 111 aa, Artificial Sequence; identical to SEQ ID NO: 22600
  Description of Artificial Sequence: Synthetic polypeptide
  VL of XENP023047

SEQ ID NO: 35484 - protein, 15 aa, Artificial Sequence
  Description of Artificial Sequence: Synthetic peptide
  XENP023047 vlCDR1
RASQSVDYDGDSYMN

SEQ ID NO: 35485 - protein, 7 aa, Artificial Sequence
  Description of Artificial Sequence: Synthetic peptide
  XENP023047 vlCDR2
AASELES

SEQ ID NO: 35486 - protein, 9 aa, Artificial Sequence
  Description of Artificial Sequence: Synthetic peptide
  XENP023047 vlCDR3
QQSNEDPFT

SEQ ID NO: 35487 - protein, 226 aa, Artificial Sequence
  Description of Artificial Sequence: Synthetic polypeptide
  XENP023048 7G8_H3.73_L1.34_Fab Heavy Chain
EVQLVESGGGLVQPGGSLRLSCAASGFTFDDAWMSWVRQAPGKGLEWVAEISTKANNHATYYAESVKGRFTISRDDSKSSVYLQMNSLRAEDTAVYYCTRLATYDWYFDVWGQGTTVTVSSASTKGPSVFPLAPSSKSTSGGTAALGCLVKDYFPEPVTVSWNSGALTSGVHTFPAVLQSSGLYSLSSVVTVPSSSLGTQTYICNVNHKPSNTKVDKKVEPKSCGS

SEQ ID NO: 35488 - protein, 121 aa, Artificial Sequence
  Description of Artificial Sequence: Synthetic polypeptide
  VH of XENP023048
EVQLVESGGGLVQPGGSLRLSCAASGFTFDDAWMSWVRQAPGKGLEWVAEISTKANNHATYYAESVKGRFTISRDDSKSSVYLQMNSLRAEDTAVYYCTRLATYDWYFDVWGQGTTVTVSS

SEQ ID NO: 35489 - protein, 5 aa, Artificial Sequence
  Description of Artificial Sequence: Synthetic peptide
  XENP023048 vhCDR1
DAWMS

SEQ ID NO: 35490 - protein, 19 aa, Artificial Sequence
  Description of Artificial Sequence: Synthetic peptide
  XENP023048 vhCDR2
EISTKANNHATYYAESVKG

SEQ ID NO: 35491 - protein, 10 aa, Artificial Sequence
  Description of Artificial Sequence: Synthetic peptide
  XENP023048 vhCDR3
LATYDWYFDV

SEQ ID NO: 35492 - protein, 218 aa, Artificial Sequence; identical to SEQ ID NO: 22599
  Description of Artificial Sequence: Synthetic polypeptide
  XENP023048 7G8_H3.73_L1.34_Fab Light Chain

SEQ ID NO: 35493 - protein, 111 aa, Artificial Sequence; identical to SEQ ID NO: 22600
  Description of Artificial Sequence: Synthetic polypeptide
  VL of XENP023048

SEQ ID NO: 35494 - protein, 15 aa, Artificial Sequence
  Description of Artificial Sequence: Synthetic peptide
  XENP023048 vlCDR1
RASQSVDYDGDSYMN

SEQ ID NO: 35495 - protein, 7 aa, Artificial Sequence
  Description of Artificial Sequence: Synthetic peptide
  XENP023048 vlCDR2
AASELES

SEQ ID NO: 35496 - protein, 9 aa, Artificial Sequence
  Description of Artificial Sequence: Synthetic peptide
  XENP023048 vlCDR3
QQSNEDPFT

SEQ ID NO: 35497 - protein, 226 aa, Artificial Sequence
  Description of Artificial Sequence: Synthetic polypeptide
  XENP023049 7G8_H3.74_L1.34_Fab Heavy Chain
EVQLVESGGGLVQPGGSLRLSCAASGFTFDDAWMSWVRQAPGKGLEWVAEISTKANNHATYYAESVKGRFTISRDDSKSSVYLQMNSLRAEDTAVYYCTRLATWDFYFDVWGQGTTVTVSSASTKGPSVFPLAPSSKSTSGGTAALGCLVKDYFPEPVTVSWNSGALTSGVHTFPAVLQSSGLYSLSSVVTVPSSSLGTQTYICNVNHKPSNTKVDKKVEPKSCGS

SEQ ID NO: 35498 - protein, 121 aa, Artificial Sequence
  Description of Artificial Sequence: Synthetic polypeptide
  VH of XENP023049
EVQLVESGGGLVQPGGSLRLSCAASGFTFDDAWMSWVRQAPGKGLEWVAEISTKANNHATYYAESVKGRFTISRDDSKSSVYLQMNSLRAEDTAVYYCTRLATWDFYFDVWGQGTTVTVSS

SEQ ID NO: 35499 - protein, 5 aa, Artificial Sequence
  Description of Artificial Sequence: Synthetic peptide
  XENP023049 vhCDR1
DAWMS

SEQ ID NO: 35500 - protein, 19 aa, Artificial Sequence
  Description of Artificial Sequence: Synthetic peptide
  XENP023049 vhCDR2
EISTKANNHATYYAESVKG

SEQ ID NO: 35501 - protein, 10 aa, Artificial Sequence
  Description of Artificial Sequence: Synthetic peptide
  XENP023049 vhCDR3
LATWDFYFDV

SEQ ID NO: 35502 - protein, 218 aa, Artificial Sequence; identical to SEQ ID NO: 22599
  Description of Artificial Sequence: Synthetic polypeptide
  XENP023049 7G8_H3.74_L1.34_Fab Light Chain

SEQ ID NO: 35503 - protein, 111 aa, Artificial Sequence; identical to SEQ ID NO: 22600
  Description of Artificial Sequence: Synthetic polypeptide
  VL of XENP023049

SEQ ID NO: 35504 - protein, 15 aa, Artificial Sequence
  Description of Artificial Sequence: Synthetic peptide
  XENP023049 vlCDR1
RASQSVDYDGDSYMN

SEQ ID NO: 35505 - protein, 7 aa, Artificial Sequence
  Description of Artificial Sequence: Synthetic peptide
  XENP023049 vlCDR2
AASELES

SEQ ID NO: 35506 - protein, 9 aa, Artificial Sequence
  Description of Artificial Sequence: Synthetic peptide
  XENP023049 vlCDR3
QQSNEDPFT

SEQ ID NO: 35507 - protein, 226 aa, Artificial Sequence
  Description of Artificial Sequence: Synthetic polypeptide
  XENP023050 7G8_H3.75_L1.34_Fab Heavy Chain
EVQLVESGGGLVQPGGSLRLSCAASGFTFDDAWMSWVRQAPGKGLEWVAEISTKANNHATYYAESVKGRFTISRDDSKSSVYLQMNSLRAEDTAVYYCTRLATWDYYFDVWGQGTTVTVSSASTKGPSVFPLAPSSKSTSGGTAALGCLVKDYFPEPVTVSWNSGALTSGVHTFPAVLQSSGLYSLSSVVTVPSSSLGTQTYICNVNHKPSNTKVDKKVEPKSCGS

SEQ ID NO: 35508 - protein, 121 aa, Artificial Sequence
  Description of Artificial Sequence: Synthetic polypeptide
  VH of XENP023050
EVQLVESGGGLVQPGGSLRLSCAASGFTFDDAWMSWVRQAPGKGLEWVAEISTKANNHATYYAESVKGRFTISRDDSKSSVYLQMNSLRAEDTAVYYCTRLATWDYYFDVWGQGTTVTVSS

SEQ ID NO: 35509 - protein, 5 aa, Artificial Sequence
  Description of Artificial Sequence: Synthetic peptide
  XENP023050 vhCDR1
DAWMS

SEQ ID NO: 35510 - protein, 19 aa, Artificial Sequence
  Description of Artificial Sequence: Synthetic peptide
  XENP023050 vhCDR2
EISTKANNHATYYAESVKG

SEQ ID NO: 35511 - protein, 10 aa, Artificial Sequence
  Description of Artificial Sequence: Synthetic peptide
  XENP023050 vhCDR3
LATWDYYFDV

SEQ ID NO: 35512 - protein, 218 aa, Artificial Sequence; identical to SEQ ID NO: 22599
  Description of Artificial Sequence: Synthetic polypeptide
  XENP023050 7G8_H3.75_L1.34_Fab Light Chain

SEQ ID NO: 35513 - protein, 111 aa, Artificial Sequence; identical to SEQ ID NO: 22600
  Description of Artificial Sequence: Synthetic polypeptide
  VL of XENP023050

SEQ ID NO: 35514 - protein, 15 aa, Artificial Sequence
  Description of Artificial Sequence: Synthetic peptide
  XENP023050 vlCDR1
RASQSVDYDGDSYMN

SEQ ID NO: 35515 - protein, 7 aa, Artificial Sequence
  Description of Artificial Sequence: Synthetic peptide
  XENP023050 vlCDR2
AASELES

SEQ ID NO: 35516 - protein, 9 aa, Artificial Sequence
  Description of Artificial Sequence: Synthetic peptide
  XENP023050 vlCDR3
QQSNEDPFT

SEQ ID NO: 35517 - protein, 226 aa, Artificial Sequence; identical to SEQ ID NO: 32254
  Description of Artificial Sequence: Synthetic polypeptide
  XENP023051 7G8_H3.30_L1.38_Fab Heavy Chain

SEQ ID NO: 35518 - protein, 121 aa, Artificial Sequence; identical to SEQ ID NO: 22485
  Description of Artificial Sequence: Synthetic polypeptide
  VH of XENP023051

SEQ ID NO: 35519 - protein, 5 aa, Artificial Sequence
  Description of Artificial Sequence: Synthetic peptide
  XENP023051 vhCDR1
DAWMS

SEQ ID NO: 35520 - protein, 19 aa, Artificial Sequence
  Description of Artificial Sequence: Synthetic peptide
  XENP023051 vhCDR2
EISTKANNHATYYAESVKG

SEQ ID NO: 35521 - protein, 10 aa, Artificial Sequence
  Description of Artificial Sequence: Synthetic peptide
  XENP023051 vhCDR3
LATWDWYFDV

SEQ ID NO: 35522 - protein, 218 aa, Artificial Sequence
  Description of Artificial Sequence: Synthetic polypeptide
  XENP023051 7G8_H3.30_L1.38_Fab Light Chain
DIVLTQSPSSLSASVGDRVTITCRASQSVDYEGDSYMNWYQQKPGKPPKLLIYAASELESGIPARFSGSGSGTDFTLTISSLQPEDFATYYCQQSNEDPFTFGSGTKLEIKRTVAAPSVFIFPPSDEQLKSGTASVVCLLNNFYPREAKVQWKVDNALQSGNSQESVTEQDSKDSTYSLSSTLTLSKADYEKHKVYACEVTHQGLSSPVTKSFNRGEC

SEQ ID NO: 35523 - protein, 111 aa, Artificial Sequence
  Description of Artificial Sequence: Synthetic polypeptide
  VL of XENP023051
DIVLTQSPSSLSASVGDRVTITCRASQSVDYEGDSYMNWYQQKPGKPPKLLIYAASELESGIPARFSGSGSGTDFTLTISSLQPEDFATYYCQQSNEDPFTFGSGTKLEIK

SEQ ID NO: 35524 - protein, 15 aa, Artificial Sequence
  Description of Artificial Sequence: Synthetic peptide
  XENP023051 vlCDR1
RASQSVDYEGDSYMN

SEQ ID NO: 35525 - protein, 7 aa, Artificial Sequence
  Description of Artificial Sequence: Synthetic peptide
  XENP023051 vlCDR2
AASELES

SEQ ID NO: 35526 - protein, 9 aa, Artificial Sequence
  Description of Artificial Sequence: Synthetic peptide
  XENP023051 vlCDR3
QQSNEDPFT

SEQ ID NO: 35527 - protein, 226 aa, Artificial Sequence; identical to SEQ ID NO: 32254
  Description of Artificial Sequence: Synthetic polypeptide
  XENP023052 7G8_H3.30_L1.39_Fab Heavy Chain

SEQ ID NO: 35528 - protein, 121 aa, Artificial Sequence; identical to SEQ ID NO: 22485
  Description of Artificial Sequence: Synthetic polypeptide
  VH of XENP023052

SEQ ID NO: 35529 - protein, 5 aa, Artificial Sequence
  Description of Artificial Sequence: Synthetic peptide
  XENP023052 vhCDR1
DAWMS

SEQ ID NO: 35530 - protein, 19 aa, Artificial Sequence
  Description of Artificial Sequence: Synthetic peptide
  XENP023052 vhCDR2
EISTKANNHATYYAESVKG

SEQ ID NO: 35531 - protein, 10 aa, Artificial Sequence
  Description of Artificial Sequence: Synthetic peptide
  XENP023052 vhCDR3
LATWDWYFDV

SEQ ID NO: 35532 - protein, 218 aa, Artificial Sequence
  Description of Artificial Sequence: Synthetic polypeptide
  XENP023052 7G8_H3.30_L1.39_Fab Light Chain
DIVLTQSPSSLSASVGDRVTITCRASQSVDYYGDSYMNWYQQKPGKPPKLLIYAASELESGIPARFSGSGSGTDFTLTISSLQPEDFATYYCQQSNEDPFTFGSGTKLEIKRTVAAPSVFIFPPSDEQLKSGTASVVCLLNNFYPREAKVQWKVDNALQSGNSQESVTEQDSKDSTYSLSSTLTLSKADYEKHKVYACEVTHQGLSSPVTKSFNRGEC

SEQ ID NO: 35533 - protein, 111 aa, Artificial Sequence
  Description of Artificial Sequence: Synthetic polypeptide
  VL of XENP023052
DIVLTQSPSSLSASVGDRVTITCRASQSVDYYGDSYMNWYQQKPGKPPKLLIYAASELESGIPARFSGSGSGTDFTLTISSLQPEDFATYYCQQSNEDPFTFGSGTKLEIK

SEQ ID NO: 35534 - protein, 15 aa, Artificial Sequence
  Description of Artificial Sequence: Synthetic peptide
  XENP023052 vlCDR1
RASQSVDYYGDSYMN

SEQ ID NO: 35535 - protein, 7 aa, Artificial Sequence
  Description of Artificial Sequence: Synthetic peptide
  XENP023052 vlCDR2
AASELES

SEQ ID NO: 35536 - protein, 9 aa, Artificial Sequence
  Description of Artificial Sequence: Synthetic peptide
  XENP023052 vlCDR3
QQSNEDPFT

SEQ ID NO: 35537 - protein, 226 aa, Artificial Sequence; identical to SEQ ID NO: 32254
  Description of Artificial Sequence: Synthetic polypeptide
  XENP023053 7G8_H3.30_L1.40_Fab Heavy Chain

SEQ ID NO: 35538 - protein, 121 aa, Artificial Sequence; identical to SEQ ID NO: 22485
  Description of Artificial Sequence: Synthetic polypeptide
  VH of XENP023053

SEQ ID NO: 35539 - protein, 5 aa, Artificial Sequence
  Description of Artificial Sequence: Synthetic peptide
  XENP023053 vhCDR1
DAWMS

SEQ ID NO: 35540 - protein, 19 aa, Artificial Sequence
  Description of Artificial Sequence: Synthetic peptide
  XENP023053 vhCDR2
EISTKANNHATYYAESVKG

SEQ ID NO: 35541 - protein, 10 aa, Artificial Sequence
  Description of Artificial Sequence: Synthetic peptide
  XENP023053 vhCDR3
LATWDWYFDV

SEQ ID NO: 35542 - protein, 218 aa, Artificial Sequence
  Description of Artificial Sequence: Synthetic polypeptide
  XENP023053 7G8_H3.30_L1.40_Fab Light Chain
DIVLTQSPSSLSASVGDRVTITCRASQSVDYDADSYMNWYQQKPGKPPKLLIYAASELESGIPARFSGSGSGTDFTLTISSLQPEDFATYYCQQSNEDPFTFGSGTKLEIKRTVAAPSVFIFPPSDEQLKSGTASVVCLLNNFYPREAKVQWKVDNALQSGNSQESVTEQDSKDSTYSLSSTLTLSKADYEKHKVYACEVTHQGLSSPVTKSFNRGEC

SEQ ID NO: 35543 - protein, 111 aa, Artificial Sequence
  Description of Artificial Sequence: Synthetic polypeptide
  VL of XENP023053
DIVLTQSPSSLSASVGDRVTITCRASQSVDYDADSYMNWYQQKPGKPPKLLIYAASELESGIPARFSGSGSGTDFTLTISSLQPEDFATYYCQQSNEDPFTFGSGTKLEIK

SEQ ID NO: 35544 - protein, 15 aa, Artificial Sequence
  Description of Artificial Sequence: Synthetic peptide
  XENP023053 vlCDR1
RASQSVDYDADSYMN

SEQ ID NO: 35545 - protein, 7 aa, Artificial Sequence
  Description of Artificial Sequence: Synthetic peptide
  XENP023053 vlCDR2
AASELES

SEQ ID NO: 35546 - protein, 9 aa, Artificial Sequence
  Description of Artificial Sequence: Synthetic peptide
  XENP023053 vlCDR3
QQSNEDPFT

SEQ ID NO: 35547 - protein, 226 aa, Artificial Sequence; identical to SEQ ID NO: 32254
  Description of Artificial Sequence: Synthetic polypeptide
  XENP023054 7G8_H3.30_L1.41_Fab Heavy Chain

SEQ ID NO: 35548 - protein, 121 aa, Artificial Sequence; identical to SEQ ID NO: 22485
  Description of Artificial Sequence: Synthetic polypeptide
  VH of XENP023054

SEQ ID NO: 35549 - protein, 5 aa, Artificial Sequence
  Description of Artificial Sequence: Synthetic peptide
  XENP023054 vhCDR1
DAWMS

SEQ ID NO: 35550 - protein, 19 aa, Artificial Sequence
  Description of Artificial Sequence: Synthetic peptide
  XENP023054 vhCDR2
EISTKANNHATYYAESVKG

SEQ ID NO: 35551 - protein, 10 aa, Artificial Sequence
  Description of Artificial Sequence: Synthetic peptide
  XENP023054 vhCDR3
LATWDWYFDV

SEQ ID NO: 35552 - protein, 218 aa, Artificial Sequence
  Description of Artificial Sequence: Synthetic polypeptide
  XENP023054 7G8_H3.30_L1.41_Fab Light Chain
DIVLTQSPSSLSASVGDRVTITCRASQSVDYDQDSYMNWYQQKPGKPPKLLIYAASELESGIPARFSGSGSGTDFTLTISSLQPEDFATYYCQQSNEDPFTFGSGTKLEIKRTVAAPSVFIFPPSDEQLKSGTASVVCLLNNFYPREAKVQWKVDNALQSGNSQESVTEQDSKDSTYSLSSTLTLSKADYEKHKVYACEVTHQGLSSPVTKSFNRGEC

SEQ ID NO: 35553 - protein, 111 aa, Artificial Sequence
  Description of Artificial Sequence: Synthetic polypeptide
  VL of XENP023054
DIVLTQSPSSLSASVGDRVTITCRASQSVDYDQDSYMNWYQQKPGKPPKLLIYAASELESGIPARFSGSGSGTDFTLTISSLQPEDFATYYCQQSNEDPFTFGSGTKLEIK

SEQ ID NO: 35554 - protein, 15 aa, Artificial Sequence
  Description of Artificial Sequence: Synthetic peptide
  XENP023054 vlCDR1
RASQSVDYDQDSYMN

SEQ ID NO: 35555 - protein, 7 aa, Artificial Sequence
  Description of Artificial Sequence: Synthetic peptide
  XENP023054 vlCDR2
AASELES

SEQ ID NO: 35556 - protein, 9 aa, Artificial Sequence
  Description of Artificial Sequence: Synthetic peptide
  XENP023054 vlCDR3
QQSNEDPFT

SEQ ID NO: 35557 - protein, 226 aa, Artificial Sequence; identical to SEQ ID NO: 32254
  Description of Artificial Sequence: Synthetic polypeptide
  XENP023055 7G8_H3.30_L1.42_Fab Heavy Chain

SEQ ID NO: 35558 - protein, 121 aa, Artificial Sequence; identical to SEQ ID NO: 22485
  Description of Artificial Sequence: Synthetic polypeptide
  VH of XENP023055

SEQ ID NO: 35559 - protein, 5 aa, Artificial Sequence
  Description of Artificial Sequence: Synthetic peptide
  XENP023055 vhCDR1
DAWMS

SEQ ID NO: 35560 - protein, 19 aa, Artificial Sequence
  Description of Artificial Sequence: Synthetic peptide
  XENP023055 vhCDR2
EISTKANNHATYYAESVKG

SEQ ID NO: 35561 - protein, 10 aa, Artificial Sequence
  Description of Artificial Sequence: Synthetic peptide
  XENP023055 vhCDR3
LATWDWYFDV

SEQ ID NO: 35562 - protein, 218 aa, Artificial Sequence
  Description of Artificial Sequence: Synthetic polypeptide
  XENP023055 7G8_H3.30_L1.42_Fab Light Chain
DIVLTQSPSSLSASVGDRVTITCRASQSVDYDDDSYMNWYQQKPGKPPKLLIYAASELESGIPARFSGSGSGTDFTLTISSLQPEDFATYYCQQSNEDPFTFGSGTKLEIKRTVAAPSVFIFPPSDEQLKSGTASVVCLLNNFYPREAKVQWKVDNALQSGNSQESVTEQDSKDSTYSLSSTLTLSKADYEKHKVYACEVTHQGLSSPVTKSFNRGEC

SEQ ID NO: 35563 - protein, 111 aa, Artificial Sequence
  Description of Artificial Sequence: Synthetic polypeptide
  VL of XENP023055
DIVLTQSPSSLSASVGDRVTITCRASQSVDYDDDSYMNWYQQKPGKPPKLLIYAASELESGIPARFSGSGSGTDFTLTISSLQPEDFATYYCQQSNEDPFTFGSGTKLEIK

SEQ ID NO: 35564 - protein, 15 aa, Artificial Sequence
  Description of Artificial Sequence: Synthetic peptide
  XENP023055 vlCDR1
RASQSVDYDDDSYMN

SEQ ID NO: 35565 - protein, 7 aa, Artificial Sequence
  Description of Artificial Sequence: Synthetic peptide
  XENP023055 vlCDR2
AASELES

SEQ ID NO: 35566 - protein, 9 aa, Artificial Sequence
  Description of Artificial Sequence: Synthetic peptide
  XENP023055 vlCDR3
QQSNEDPFT

SEQ ID NO: 35567 - protein, 226 aa, Artificial Sequence; identical to SEQ ID NO: 32254
  Description of Artificial Sequence: Synthetic polypeptide
  XENP023056 7G8_H3.30_L1.43_Fab Heavy Chain

SEQ ID NO: 35568 - protein, 121 aa, Artificial Sequence; identical to SEQ ID NO: 22485
  Description of Artificial Sequence: Synthetic polypeptide
  VH of XENP023056

SEQ ID NO: 35569 - protein, 5 aa, Artificial Sequence
  Description of Artificial Sequence: Synthetic peptide
  XENP023056 vhCDR1
DAWMS

SEQ ID NO: 35570 - protein, 19 aa, Artificial Sequence
  Description of Artificial Sequence: Synthetic peptide
  XENP023056 vhCDR2
EISTKANNHATYYAESVKG

SEQ ID NO: 35571 - protein, 10 aa, Artificial Sequence
  Description of Artificial Sequence: Synthetic peptide
  XENP023056 vhCDR3
LATWDWYFDV

SEQ ID NO: 35572 - protein, 218 aa, Artificial Sequence
  Description of Artificial Sequence: Synthetic polypeptide
  XENP023056 7G8_H3.30_L1.43_Fab Light Chain
DIVLTQSPSSLSASVGDRVTITCRASQSVDYDYDSYMNWYQQKPGKPPKLLIYAASELESGIPARFSGSGSGTDFTLTISSLQPEDFATYYCQQSNEDPFTFGSGTKLEIKRTVAAPSVFIFPPSDEQLKSGTASVVCLLNNFYPREAKVQWKVDNALQSGNSQESVTEQDSKDSTYSLSSTLTLSKADYEKHKVYACEVTHQGLSSPVTKSFNRGEC

SEQ ID NO: 35573 - protein, 111 aa, Artificial Sequence
  Description of Artificial Sequence: Synthetic polypeptide
  VL of XENP023056
DIVLTQSPSSLSASVGDRVTITCRASQSVDYDYDSYMNWYQQKPGKPPKLLIYAASELESGIPARFSGSGSGTDFTLTISSLQPEDFATYYCQQSNEDPFTFGSGTKLEIK

SEQ ID NO: 35574 - protein, 15 aa, Artificial Sequence
  Description of Artificial Sequence: Synthetic peptide
  XENP023056 vlCDR1
RASQSVDYDYDSYMN

SEQ ID NO: 35575 - protein, 7 aa, Artificial Sequence
  Description of Artificial Sequence: Synthetic peptide
  XENP023056 vlCDR2
AASELES

SEQ ID NO: 35576 - protein, 9 aa, Artificial Sequence
  Description of Artificial Sequence: Synthetic peptide
  XENP023056 vlCDR3
QQSNEDPFT

SEQ ID NO: 35577 - protein, 226 aa, Artificial Sequence; identical to SEQ ID NO: 35417
  Description of Artificial Sequence: Synthetic polypeptide
  XENP023220 7G8_H3.66_L1.39_Fab Heavy Chain

SEQ ID NO: 35578 - protein, 121 aa, Artificial Sequence; identical to SEQ ID NO: 35418
  Description of Artificial Sequence: Synthetic polypeptide
  VH of XENP023220

SEQ ID NO: 35579 - protein, 5 aa, Artificial Sequence
  Description of Artificial Sequence: Synthetic peptide
  XENP023220 vhCDR1
EAWMS

SEQ ID NO: 35580 - protein, 19 aa, Artificial Sequence
  Description of Artificial Sequence: Synthetic peptide
  XENP023220 vhCDR2
EISTKANNHATYYAESVKG

SEQ ID NO: 35581 - protein, 10 aa, Artificial Sequence
  Description of Artificial Sequence: Synthetic peptide
  XENP023220 vhCDR3
LATWDWYFDV

SEQ ID NO: 35582 - protein, 218 aa, Artificial Sequence; identical to SEQ ID NO: 35532
  Description of Artificial Sequence: Synthetic polypeptide
  XENP023220 7G8_H3.66_L1.39_Fab Light Chain

SEQ ID NO: 35583 - protein, 111 aa, Artificial Sequence; identical to SEQ ID NO: 35533
  Description of Artificial Sequence: Synthetic polypeptide
  VL of XENP023220

SEQ ID NO: 35584 - protein, 15 aa, Artificial Sequence
  Description of Artificial Sequence: Synthetic peptide
  XENP023220 vlCDR1
RASQSVDYYGDSYMN

SEQ ID NO: 35585 - protein, 7 aa, Artificial Sequence
  Description of Artificial Sequence: Synthetic peptide
  XENP023220 vlCDR2
AASELES

SEQ ID NO: 35586 - protein, 9 aa, Artificial Sequence
  Description of Artificial Sequence: Synthetic peptide
  XENP023220 vlCDR3
QQSNEDPFT

SEQ ID NO: 35587 - protein, 226 aa, Artificial Sequence; identical to SEQ ID NO: 35427
  Description of Artificial Sequence: Synthetic polypeptide
  XENP023221 7G8_H3.67_L1.39_Fab Heavy Chain

SEQ ID NO: 35588 - protein, 121 aa, Artificial Sequence; identical to SEQ ID NO: 35428
  Description of Artificial Sequence: Synthetic polypeptide
  VH of XENP023221

SEQ ID NO: 35589 - protein, 5 aa, Artificial Sequence
  Description of Artificial Sequence: Synthetic peptide
  XENP023221 vhCDR1
DTWMS

SEQ ID NO: 35590 - protein, 19 aa, Artificial Sequence
  Description of Artificial Sequence: Synthetic peptide
  XENP023221 vhCDR2
EISTKANNHATYYAESVKG

SEQ ID NO: 35591 - protein, 10 aa, Artificial Sequence
  Description of Artificial Sequence: Synthetic peptide
  XENP023221 vhCDR3
LATWDWYFDV

SEQ ID NO: 35592 - protein, 218 aa, Artificial Sequence; identical to SEQ ID NO: 35532
  Description of Artificial Sequence: Synthetic polypeptide
  XENP023221 7G8_H3.67_L1.39_Fab Light Chain

SEQ ID NO: 35593 - protein, 111 aa, Artificial Sequence; identical to SEQ ID NO: 35533
  Description of Artificial Sequence: Synthetic polypeptide
  VL of XENP023221

SEQ ID NO: 35594 - protein, 15 aa, Artificial Sequence
  Description of Artificial Sequence: Synthetic peptide
  XENP023221 vlCDR1
RASQSVDYYGDSYMN

SEQ ID NO: 35595 - protein, 7 aa, Artificial Sequence
  Description of Artificial Sequence: Synthetic peptide
  XENP023221 vlCDR2
AASELES

SEQ ID NO: 35596 - protein, 9 aa, Artificial Sequence
  Description of Artificial Sequence: Synthetic peptide
  XENP023221 vlCDR3
QQSNEDPFT

SEQ ID NO: 35597 - protein, 226 aa, Artificial Sequence; identical to SEQ ID NO: 35467
  Description of Artificial Sequence: Synthetic polypeptide
  XENP023222 7G8_H3.71_L1.39_Fab Heavy Chain

SEQ ID NO: 35598 - protein, 121 aa, Artificial Sequence; identical to SEQ ID NO: 35468
  Description of Artificial Sequence: Synthetic polypeptide
  VH of XENP023222

SEQ ID NO: 35599 - protein, 5 aa, Artificial Sequence
  Description of Artificial Sequence: Synthetic peptide
  XENP023222 vhCDR1
DAWMS

SEQ ID NO: 35600 - protein, 19 aa, Artificial Sequence
  Description of Artificial Sequence: Synthetic peptide
  XENP023222 vhCDR2
EISTKAYNHATYYAESVKG

SEQ ID NO: 35601 - protein, 10 aa, Artificial Sequence
  Description of Artificial Sequence: Synthetic peptide
  XENP023222 vhCDR3
LATWDWYFDV

SEQ ID NO: 35602 - protein, 218 aa, Artificial Sequence; identical to SEQ ID NO: 35532
  Description of Artificial Sequence: Synthetic polypeptide
  XENP023222 7G8_H3.71_L1.39_Fab Light Chain

SEQ ID NO: 35603 - protein, 111 aa, Artificial Sequence; identical to SEQ ID NO: 35533
  Description of Artificial Sequence: Synthetic polypeptide
  VL of XENP023222

SEQ ID NO: 35604 - protein, 15 aa, Artificial Sequence
  Description of Artificial Sequence: Synthetic peptide
  XENP023222 vlCDR1
RASQSVDYYGDSYMN

SEQ ID NO: 35605 - protein, 7 aa, Artificial Sequence
  Description of Artificial Sequence: Synthetic peptide
  XENP023222 vlCDR2
AASELES

SEQ ID NO: 35606 - protein, 9 aa, Artificial Sequence
  Description of Artificial Sequence: Synthetic peptide
  XENP023222 vlCDR3
QQSNEDPFT

SEQ ID NO: 35607 - protein, 450 aa, Artificial Sequence
  Description of Artificial Sequence: Synthetic polypeptide
  XENP022841 7G8_H3.30_L1.34_Fab-[CTLA-4]_H3.23_L0.129_scFv Fab -Fc Heavy Chain
EVQLVESGGGLVQPGGSLRLSCAASGFTFDDAWMSWVRQAPGKGLEWVAEISTKANNHATYYAESVKGRFTISRDDSKSSVYLQMNSLRAEDTAVYYCTRLATWDWYFDVWGQGTTVTVSSASTKGPSVFPLAPSSKSTSGGTAALGCLVKDYFPEPVTVSWNSGALTSGVHTFPAVLQSSGLYSLSSVVTVPSSSLGTQTYICNVNHKPSDTKVDKKVEPKSCDKTHTCPPCPAPPVAGPSVFLFPPKPKDTLMISRTPEVTCVVVDVKHEDPEVKFNWYVDGVEVHNAKTKPREEEYNSTYRVVSVLTVLHQDWLNGKEYKCKVSNKALPAPIEKTISKAKGQPREPQVYTLPPSREEMTKNQVSLTCDVSGFYPSDIAVEWESDGQPENNYKTTPPVLDSDGSFFLYSKLTVDKSRWEQGDVFSCSVLHEALHSHYTQKSLSLSPGK

SEQ ID NO: 35608 - protein, 121 aa, Artificial Sequence; identical to SEQ ID NO: 22485
  Description of Artificial Sequence: Synthetic polypeptide
  VH of XENP022841

SEQ ID NO: 35609 - protein, 5 aa, Artificial Sequence
  Description of Artificial Sequence: Synthetic peptide
  XENP022841 vhCDR1
DAWMS

SEQ ID NO: 35610 - protein, 19 aa, Artificial Sequence
  Description of Artificial Sequence: Synthetic peptide
  XENP022841 vhCDR2
EISTKANNHATYYAESVKG

SEQ ID NO: 35611 - protein, 10 aa, Artificial Sequence
  Description of Artificial Sequence: Synthetic peptide
  XENP022841 vhCDR3
LATWDWYFDV

SEQ ID NO: 35612 - protein, 477 aa, Artificial Sequence
  Description of Artificial Sequence: Synthetic polypeptide
  XENP022841 7G8_H3.30_L1.34_Fab-[CTLA-4]_H3.23_L0.129_scFv scFv-Fc Heavy Chain
EVQLVESGGGLVKPGGSLRLSCAASGFTFSSYTMHWVRQAPGKGLEWVSFISYDGNYKYYADSVKGRFTISRDNAKNSLYLQMNSLRAEDTAVYYCARGGHLGPFDLWGQGTMVTVSSGKPGSGKPGSGKPGSGKPGSEIVLTQSPATLSLSPGERATLSCRASQSVGSSYLAWYQQKPGQAPRLLIYGASSRATGIPDRFSGSGSGTDFTLTISRLEPEDFAVYYCQQYGSSPWTFGQGTKVEIKEPKSSDKTHTCPPCPAPPVAGPSVFLFPPKPKDTLMISRTPEVTCVVVDVKHEDPEVKFNWYVDGVEVHNAKTKPREEQYNSTYRVVSVLTVLHQDWLNGKEYKCKVSNKALPAPIEKTISKAKGQPREPQVYTLPPSREQMTKNQVKLTCLVKGFYPSDIAVEWESNGQPENNYKTTPPVLDSDGSFFLYSKLTVDKSRWQQGNVFSCSVLHEALHSHYTQKSLSLSPGK

SEQ ID NO: 35613 - protein, 118 aa, Artificial Sequence; identical to SEQ ID NO: 2632
  Description of Artificial Sequence: Synthetic polypeptide
  VH of XENP022841

SEQ ID NO: 35614 - protein, 108 aa, Artificial Sequence; identical to SEQ ID NO: 2768
  Description of Artificial Sequence: Synthetic polypeptide
  VL of XENP022841

SEQ ID NO: 35615 - protein, 231 aa, Artificial Sequence; identical to SEQ ID NO: 21572
  Description of Artificial Sequence: Synthetic polypeptide
  Fc chain of XENP022841

SEQ ID NO: 35616 - protein, 5 aa, Artificial Sequence
  Description of Artificial Sequence: Synthetic peptide
  XENP022841 vhCDR1
SYTMH

SEQ ID NO: 35617 - protein, 17 aa, Artificial Sequence
  Description of Artificial Sequence: Synthetic peptide
  XENP022841 vhCDR2
FISYDGNYKYYADSVKG

SEQ ID NO: 35618 - protein, 9 aa, Artificial Sequence
  Description of Artificial Sequence: Synthetic peptide
  XENP022841 vhCDR3
GGHLGPFDL

SEQ ID NO: 35619 - protein, 12 aa, Artificial Sequence
  Description of Artificial Sequence: Synthetic peptide
  XENP022841 vlCDR1
RASQSVGSSYLA

SEQ ID NO: 35620 - protein, 7 aa, Artificial Sequence
  Description of Artificial Sequence: Synthetic peptide
  XENP022841 vlCDR2
GASSRAT

SEQ ID NO: 35621 - protein, 9 aa, Artificial Sequence
  Description of Artificial Sequence: Synthetic peptide
  XENP022841 vlCDR3
QQYGSSPWT

SEQ ID NO: 35622 - protein, 218 aa, Artificial Sequence; identical to SEQ ID NO: 22599
  Description of Artificial Sequence: Synthetic polypeptide
  XENP022841 7G8_H3.30_L1.34_Fab-[CTLA-4]_H3.23_L0.129_scFv Light Chain

SEQ ID NO: 35623 - protein, 111 aa, Artificial Sequence; identical to SEQ ID NO: 22600
  Description of Artificial Sequence: Synthetic polypeptide
  VL of XENP022841

SEQ ID NO: 35624 - protein, 15 aa, Artificial Sequence
  Description of Artificial Sequence: Synthetic peptide
  XENP022841 vlCDR1
RASQSVDYDGDSYMN

SEQ ID NO: 35625 - protein, 7 aa, Artificial Sequence
  Description of Artificial Sequence: Synthetic peptide
  XENP022841 vlCDR2
AASELES

SEQ ID NO: 35626 - protein, 9 aa, Artificial Sequence
  Description of Artificial Sequence: Synthetic peptide
  XENP022841 vlCDR3
QQSNEDPFT

SEQ ID NO: 35627 - protein, 450 aa, Artificial Sequence; identical to SEQ ID NO: 35607
  Description of Artificial Sequence: Synthetic polypeptide
  XENP022842 7G8_H3.30_L1.36_Fab-[CTLA-4]_H3.23_L0.129_scFv Fab-Fc Heavy Chain

SEQ ID NO: 35628 - protein, 121 aa, Artificial Sequence; identical to SEQ ID NO: 22485
  Description of Artificial Sequence: Synthetic polypeptide
  VH of XENP022842

SEQ ID NO: 35629 - protein, 5 aa, Artificial Sequence
  Description of Artificial Sequence: Synthetic peptide
  XENP022842 vhCDR1
DAWMS

SEQ ID NO: 35630 - protein, 19 aa, Artificial Sequence
  Description of Artificial Sequence: Synthetic peptide
  XENP022842 vhCDR2
EISTKANNHATYYAESVKG

SEQ ID NO: 35631 - protein, 10 aa, Artificial Sequence
  Description of Artificial Sequence: Synthetic peptide
  XENP022842 vhCDR3
LATWDWYFDV

SEQ ID NO: 35632 - protein, 477 aa, Artificial Sequence; identical to SEQ ID NO: 35612
  Description of Artificial Sequence: Synthetic polypeptide
  XENP022842 7G8_H3.30_L1.36_Fab-[CTLA-4]_H3.23_L0.129_scFv sc Fv-Fc Heavy Chain

SEQ ID NO: 35633 - protein, 118 aa, Artificial Sequence; identical to SEQ ID NO: 2632
  Description of Artificial Sequence: Synthetic polypeptide
  VH of XENP022842

SEQ ID NO: 35634 - protein, 108 aa, Artificial Sequence; identical to SEQ ID NO: 2768
  Description of Artificial Sequence: Synthetic polypeptide
  VL of XENP022842

SEQ ID NO: 35635 - protein, 231 aa, Artificial Sequence; identical to SEQ ID NO: 21572
  Description of Artificial Sequence: Synthetic polypeptide
  Fc chain of XENP022842

SEQ ID NO: 35636 - protein, 5 aa, Artificial Sequence
  Description of Artificial Sequence: Synthetic peptide
  XENP022842 vhCDR1
SYTMH

SEQ ID NO: 35637 - protein, 17 aa, Artificial Sequence
  Description of Artificial Sequence: Synthetic peptide
  XENP022842 vhCDR2
FISYDGNYKYYADSVKG

SEQ ID NO: 35638 - protein, 9 aa, Artificial Sequence
  Description of Artificial Sequence: Synthetic peptide
  XENP022842 vhCDR3
GGHLGPFDL

SEQ ID NO: 35639 - protein, 12 aa, Artificial Sequence
  Description of Artificial Sequence: Synthetic peptide
  XENP022842 vlCDR1
RASQSVGSSYLA

SEQ ID NO: 35640 - protein, 7 aa, Artificial Sequence
  Description of Artificial Sequence: Synthetic peptide
  XENP022842 vlCDR2
GASSRAT

SEQ ID NO: 35641 - protein, 9 aa, Artificial Sequence
  Description of Artificial Sequence: Synthetic peptide
  XENP022842 vlCDR3
QQYGSSPWT

SEQ ID NO: 35642 - protein, 218 aa, Artificial Sequence; identical to SEQ ID NO: 22619
  Description of Artificial Sequence: Synthetic polypeptide
  XENP022842 7G8_H3.30_L1.36_Fab-[CTLA-4]_H3.23_L0.129_scFv Light Chain

SEQ ID NO: 35643 - protein, 111 aa, Artificial Sequence; identical to SEQ ID NO: 22620
  Description of Artificial Sequence: Synthetic polypeptide
  VL of XENP022842

SEQ ID NO: 35644 - protein, 15 aa, Artificial Sequence
  Description of Artificial Sequence: Synthetic peptide
  XENP022842 vlCDR1
RASQSVDHDGDSYMN

SEQ ID NO: 35645 - protein, 7 aa, Artificial Sequence
  Description of Artificial Sequence: Synthetic peptide
  XENP022842 vlCDR2
AASELES

SEQ ID NO: 35646 - protein, 9 aa, Artificial Sequence
  Description of Artificial Sequence: Synthetic peptide
  XENP022842 vlCDR3
QQSNEDPFT

SEQ ID NO: 35647 - protein, 447 aa, Artificial Sequence
  Description of Artificial Sequence: Synthetic polypeptide
  XENP022843 2A11_H1.144_L2.142_Fab-[CTLA-4]_H3.23_L0.129_scFv Fab-Fc Heavy Chain
EVQLVQSGAEVKKPGATVKISCKASGFNIKDYFMHWVQQAPGKGLEWMGWIDPELGDTEYAPKFQGRVTITADTSTNTAYMELSSLRSEDTAVYYCYARGVYQALDYWGQGTLVTVSSASTKGPSVFPLAPSSKSTSGGTAALGCLVKDYFPEPVTVSWNSGALTSGVHTFPAVLQSSGLYSLSSVVTVPSSSLGTQTYICNVNHKPSDTKVDKKVEPKSCDKTHTCPPCPAPPVAGPSVFLFPPKPKDTLMISRTPEVTCVVVDVKHEDPEVKFNWYVDGVEVHNAKTKPREEEYNSTYRVVSVLTVLHQDWLNGKEYKCKVSNKALPAPIEKTISKAKGQPREPQVYTLPPSREEMTKNQVSLTCDVSGFYPSDIAVEWESDGQPENNYKTTPPVLDSDGSFFLYSKLTVDKSRWEQGDVFSCSVLHEALHSHYTQKSLSLSPGK

SEQ ID NO: 35648 - protein, 118 aa, Artificial Sequence; identical to SEQ ID NO: 22085
  Description of Artificial Sequence: Synthetic polypeptide
  VH of XENP022843

SEQ ID NO: 35649 - protein, 5 aa, Artificial Sequence
  Description of Artificial Sequence: Synthetic peptide
  XENP022843 vhCDR1
DYFMH

SEQ ID NO: 35650 - protein, 17 aa, Artificial Sequence
  Description of Artificial Sequence: Synthetic peptide
  XENP022843 vhCDR2
WIDPELGDTEYAPKFQG

SEQ ID NO: 35651 - protein, 9 aa, Artificial Sequence
  Description of Artificial Sequence: Synthetic peptide
  XENP022843 vhCDR3
RGVYQALDY

SEQ ID NO: 35652 - protein, 477 aa, Artificial Sequence; identical to SEQ ID NO: 35612
  Description of Artificial Sequence: Synthetic polypeptide
  XENP022843 2A11_H1.144_L2.142_Fab-[CTLA-4]_H3.23_L0.129_scFv scFv-Fc Heavy Chain

SEQ ID NO: 35653 - protein, 118 aa, Artificial Sequence; identical to SEQ ID NO: 2632
  Description of Artificial Sequence: Synthetic polypeptide
  VH of XENP022843

SEQ ID NO: 35654 - protein, 108 aa, Artificial Sequence; identical to SEQ ID NO: 2768
  Description of Artificial Sequence: Synthetic polypeptide
  VL of XENP022843

SEQ ID NO: 35655 - protein, 231 aa, Artificial Sequence; identical to SEQ ID NO: 21572
  Description of Artificial Sequence: Synthetic polypeptide
  Fc chain of XENP022843

SEQ ID NO: 35656 - protein, 5 aa, Artificial Sequence
  Description of Artificial Sequence: Synthetic peptide
  XENP022843 vhCDR1
SYTMH

SEQ ID NO: 35657 - protein, 17 aa, Artificial Sequence
  Description of Artificial Sequence: Synthetic peptide
  XENP022843 vhCDR2
FISYDGNYKYYADSVKG

SEQ ID NO: 35658 - protein, 9 aa, Artificial Sequence
  Description of Artificial Sequence: Synthetic peptide
  XENP022843 vhCDR3
GGHLGPFDL

SEQ ID NO: 35659 - protein, 12 aa, Artificial Sequence
  Description of Artificial Sequence: Synthetic peptide
  XENP022843 vlCDR1
RASQSVGSSYLA

SEQ ID NO: 35660 - protein, 7 aa, Artificial Sequence
  Description of Artificial Sequence: Synthetic peptide
  XENP022843 vlCDR2
GASSRAT

SEQ ID NO: 35661 - protein, 9 aa, Artificial Sequence
  Description of Artificial Sequence: Synthetic peptide
  XENP022843 vlCDR3
QQYGSSPWT

SEQ ID NO: 35662 - protein, 214 aa, Artificial Sequence; identical to SEQ ID NO: 22279
  Description of Artificial Sequence: Synthetic polypeptide
  XENP022843 2A11_H1.144_L2.142_Fab-[CTLA-4]_H3.23_L0.129_scFv Light Chain

SEQ ID NO: 35663 - protein, 107 aa, Artificial Sequence; identical to SEQ ID NO: 22280
  Description of Artificial Sequence: Synthetic polypeptide
  VL of XENP022843

SEQ ID NO: 35664 - protein, 11 aa, Artificial Sequence
  Description of Artificial Sequence: Synthetic peptide
  XENP022843 vlCDR1
QASQDIGNYLN

SEQ ID NO: 35665 - protein, 7 aa, Artificial Sequence
  Description of Artificial Sequence: Synthetic peptide
  XENP022843 vlCDR2
FTSYLHS

SEQ ID NO: 35666 - protein, 9 aa, Artificial Sequence
  Description of Artificial Sequence: Synthetic peptide
  XENP022843 vlCDR3
QQGNTLPYT

SEQ ID NO: 35667 - protein, 447 aa, Artificial Sequence; identical to SEQ ID NO: 35647
  Description of Artificial Sequence: Synthetic polypeptide
  XENP022844 2A11_H1.144_L2.113_Fab-[CTLA-4]_H3.23_L0.129_scFv Fab-Fc Heavy Chain

SEQ ID NO: 35668 - protein, 118 aa, Artificial Sequence; identical to SEQ ID NO: 22085
  Description of Artificial Sequence: Synthetic polypeptide
  VH of XENP022844

SEQ ID NO: 35669 - protein, 5 aa, Artificial Sequence
  Description of Artificial Sequence: Synthetic peptide
  XENP022844 vhCDR1
DYFMH

SEQ ID NO: 35670 - protein, 17 aa, Artificial Sequence
  Description of Artificial Sequence: Synthetic peptide
  XENP022844 vhCDR2
WIDPELGDTEYAPKFQG

SEQ ID NO: 35671 - protein, 9 aa, Artificial Sequence
  Description of Artificial Sequence: Synthetic peptide
  XENP022844 vhCDR3
RGVYQALDY

SEQ ID NO: 35672 - protein, 477 aa, Artificial Sequence; identical to SEQ ID NO: 35612
  Description of Artificial Sequence: Synthetic polypeptide
  XENP022844 2A11_H1.144_L2.113_Fab-[CTLA-4]_H3.23_L0.129_scFv scFv-Fc Heavy Chain

SEQ ID NO: 35673 - protein, 118 aa, Artificial Sequence; identical to SEQ ID NO: 2632
  Description of Artificial Sequence: Synthetic polypeptide
  VH of XENP022844

SEQ ID NO: 35674 - protein, 108 aa, Artificial Sequence; identical to SEQ ID NO: 2768
  Description of Artificial Sequence: Synthetic polypeptide
  VL of XENP022844

SEQ ID NO: 35675 - protein, 231 aa, Artificial Sequence; identical to SEQ ID NO: 21572
  Description of Artificial Sequence: Synthetic polypeptide
  Fc chain of XENP022844

SEQ ID NO: 35676 - protein, 5 aa, Artificial Sequence
  Description of Artificial Sequence: Synthetic peptide
  XENP022844 vhCDR1
SYTMH

SEQ ID NO: 35677 - protein, 17 aa, Artificial Sequence
  Description of Artificial Sequence: Synthetic peptide
  XENP022844 vhCDR2
FISYDGNYKYYADSVKG

SEQ ID NO: 35678 - protein, 9 aa, Artificial Sequence
  Description of Artificial Sequence: Synthetic peptide
  XENP022844 vhCDR3
GGHLGPFDL

SEQ ID NO: 35679 - protein, 12 aa, Artificial Sequence
  Description of Artificial Sequence: Synthetic peptide
  XENP022844 vlCDR1
RASQSVGSSYLA

SEQ ID NO: 35680 - protein, 7 aa, Artificial Sequence
  Description of Artificial Sequence: Synthetic peptide
  XENP022844 vlCDR2
GASSRAT

SEQ ID NO: 35681 - protein, 9 aa, Artificial Sequence
  Description of Artificial Sequence: Synthetic peptide
  XENP022844 vlCDR3
QQYGSSPWT

SEQ ID NO: 35682 - protein, 214 aa, Artificial Sequence; identical to SEQ ID NO: 22079
  Description of Artificial Sequence: Synthetic polypeptide
  XENP022844 2A11_H1.144_L2.113_Fab-[CTLA-4]_H3.23_L0.129_scFv Light Chain

SEQ ID NO: 35683 - protein, 107 aa, Artificial Sequence; identical to SEQ ID NO: 22080
  Description of Artificial Sequence: Synthetic polypeptide
  VL of XENP022844

SEQ ID NO: 35684 - protein, 11 aa, Artificial Sequence
  Description of Artificial Sequence: Synthetic peptide
  XENP022844 vlCDR1
QASQDIGNYLN

SEQ ID NO: 35685 - protein, 7 aa, Artificial Sequence
  Description of Artificial Sequence: Synthetic peptide
  XENP022844 vlCDR2
FTSYLHS

SEQ ID NO: 35686 - protein, 9 aa, Artificial Sequence
  Description of Artificial Sequence: Synthetic peptide
  XENP022844 vlCDR3
QQGNTLPYT

SEQ ID NO: 35687 - protein, 447 aa, Artificial Sequence; identical to SEQ ID NO: 21564
  Description of Artificial Sequence: Synthetic polypeptide
  XENP022845 2A11_H1_L2.113_Fab-[CTLA-4]_H3.23_L0.129_scFv Fab -Fc Heavy Chain

SEQ ID NO: 35688 - protein, 118 aa, Artificial Sequence; identical to SEQ ID NO: 17236
  Description of Artificial Sequence: Synthetic polypeptide
  VH of XENP022845

SEQ ID NO: 35689 - protein, 5 aa, Artificial Sequence
  Description of Artificial Sequence: Synthetic peptide
  XENP022845 vhCDR1
DYYMH

SEQ ID NO: 35690 - protein, 17 aa, Artificial Sequence
  Description of Artificial Sequence: Synthetic peptide
  XENP022845 vhCDR2
WIDPENGDTEYAPKFQG

SEQ ID NO: 35691 - protein, 9 aa, Artificial Sequence
  Description of Artificial Sequence: Synthetic peptide
  XENP022845 vhCDR3
RGVRQALDY

SEQ ID NO: 35692 - protein, 477 aa, Artificial Sequence; identical to SEQ ID NO: 35612
  Description of Artificial Sequence: Synthetic polypeptide
  XENP022845 2A11_H1_L2.113_Fab-[CTLA-4]_H3.23_L0.129_scFv scFv -Fc Heavy Chain

SEQ ID NO: 35693 - protein, 118 aa, Artificial Sequence; identical to SEQ ID NO: 2632
  Description of Artificial Sequence: Synthetic polypeptide
  VH of XENP022845

SEQ ID NO: 35694 - protein, 108 aa, Artificial Sequence; identical to SEQ ID NO: 2768
  Description of Artificial Sequence: Synthetic polypeptide
  VL of XENP022845

SEQ ID NO: 35695 - protein, 231 aa, Artificial Sequence; identical to SEQ ID NO: 21572
  Description of Artificial Sequence: Synthetic polypeptide
  Fc chain of XENP022845

SEQ ID NO: 35696 - protein, 5 aa, Artificial Sequence
  Description of Artificial Sequence: Synthetic peptide
  XENP022845 vhCDR1
SYTMH

SEQ ID NO: 35697 - protein, 17 aa, Artificial Sequence
  Description of Artificial Sequence: Synthetic peptide
  XENP022845 vhCDR2
FISYDGNYKYYADSVKG

SEQ ID NO: 35698 - protein, 9 aa, Artificial Sequence
  Description of Artificial Sequence: Synthetic peptide
  XENP022845 vhCDR3
GGHLGPFDL

SEQ ID NO: 35699 - protein, 12 aa, Artificial Sequence
  Description of Artificial Sequence: Synthetic peptide
  XENP022845 vlCDR1
RASQSVGSSYLA

SEQ ID NO: 35700 - protein, 7 aa, Artificial Sequence
  Description of Artificial Sequence: Synthetic peptide
  XENP022845 vlCDR2
GASSRAT

SEQ ID NO: 35701 - protein, 9 aa, Artificial Sequence
  Description of Artificial Sequence: Synthetic peptide
  XENP022845 vlCDR3
QQYGSSPWT

SEQ ID NO: 35702 - protein, 214 aa, Artificial Sequence; identical to SEQ ID NO: 22079
  Description of Artificial Sequence: Synthetic polypeptide
  XENP022845 2A11_H1_L2.113_Fab-[CTLA-4]_H3.23_L0.129_scFv Light Chain

SEQ ID NO: 35703 - protein, 107 aa, Artificial Sequence; identical to SEQ ID NO: 22080
  Description of Artificial Sequence: Synthetic polypeptide
  VL of XENP022845

SEQ ID NO: 35704 - protein, 11 aa, Artificial Sequence
  Description of Artificial Sequence: Synthetic peptide
  XENP022845 vlCDR1
QASQDIGNYLN

SEQ ID NO: 35705 - protein, 7 aa, Artificial Sequence
  Description of Artificial Sequence: Synthetic peptide
  XENP022845 vlCDR2
FTSYLHS

SEQ ID NO: 35706 - protein, 9 aa, Artificial Sequence
  Description of Artificial Sequence: Synthetic peptide
  XENP022845 vlCDR3
QQGNTLPYT

SEQ ID NO: 35707 - protein, 447 aa, Artificial Sequence
  Description of Artificial Sequence: Synthetic polypeptide
  XENP022846 2A11_H1.125_L2.126_Fab-[CTLA-4]_H3.23_L0.129_scFv Fab-Fc Heavy Chain
EVQLVQSGAEVKKPGATVKISCKASGFNIKHYFMHWVQQAPGKGLEWMGWIDPYLGDTEYAPKFQGRVTITADTSTNTAYMELSSLRSEDTAVYYCYARGVYQALDYWGQGTLVTVSSASTKGPSVFPLAPSSKSTSGGTAALGCLVKDYFPEPVTVSWNSGALTSGVHTFPAVLQSSGLYSLSSVVTVPSSSLGTQTYICNVNHKPSDTKVDKKVEPKSCDKTHTCPPCPAPPVAGPSVFLFPPKPKDTLMISRTPEVTCVVVDVKHEDPEVKFNWYVDGVEVHNAKTKPREEEYNSTYRVVSVLTVLHQDWLNGKEYKCKVSNKALPAPIEKTISKAKGQPREPQVYTLPPSREEMTKNQVSLTCDVSGFYPSDIAVEWESDGQPENNYKTTPPVLDSDGSFFLYSKLTVDKSRWEQGDVFSCSVLHEALHSHYTQKSLSLSPGK

SEQ ID NO: 35708 - protein, 118 aa, Artificial Sequence; identical to SEQ ID NO: 22065
  Description of Artificial Sequence: Synthetic polypeptide
  VH of XENP022846

SEQ ID NO: 35709 - protein, 5 aa, Artificial Sequence
  Description of Artificial Sequence: Synthetic peptide
  XENP022846 vhCDR1
HYFMH

SEQ ID NO: 35710 - protein, 17 aa, Artificial Sequence
  Description of Artificial Sequence: Synthetic peptide
  XENP022846 vhCDR2
WIDPYLGDTEYAPKFQG

SEQ ID NO: 35711 - protein, 9 aa, Artificial Sequence
  Description of Artificial Sequence: Synthetic peptide
  XENP022846 vhCDR3
RGVYQALDY

SEQ ID NO: 35712 - protein, 477 aa, Artificial Sequence; identical to SEQ ID NO: 35612
  Description of Artificial Sequence: Synthetic polypeptide
  XENP022846 2A11_H1.125_L2.126_Fab-[CTLA-4]_H3.23_L0.129_scFv scFv-Fc Heavy Chain

SEQ ID NO: 35713 - protein, 118 aa, Artificial Sequence; identical to SEQ ID NO: 2632
  Description of Artificial Sequence: Synthetic polypeptide
  VH of XENP022846

SEQ ID NO: 35714 - protein, 108 aa, Artificial Sequence; identical to SEQ ID NO: 2768
  Description of Artificial Sequence: Synthetic polypeptide
  VL of XENP022846

SEQ ID NO: 35715 - protein, 231 aa, Artificial Sequence; identical to SEQ ID NO: 21572
  Description of Artificial Sequence: Synthetic polypeptide
  Fc chain of XENP022846

SEQ ID NO: 35716 - protein, 5 aa, Artificial Sequence
  Description of Artificial Sequence: Synthetic peptide
  XENP022846 vhCDR1
SYTMH

SEQ ID NO: 35717 - protein, 17 aa, Artificial Sequence
  Description of Artificial Sequence: Synthetic peptide
  XENP022846 vhCDR2
FISYDGNYKYYADSVKG

SEQ ID NO: 35718 - protein, 9 aa, Artificial Sequence
  Description of Artificial Sequence: Synthetic peptide
  XENP022846 vhCDR3
GGHLGPFDL

SEQ ID NO: 35719 - protein, 12 aa, Artificial Sequence
  Description of Artificial Sequence: Synthetic peptide
  XENP022846 vlCDR1
RASQSVGSSYLA

SEQ ID NO: 35720 - protein, 7 aa, Artificial Sequence
  Description of Artificial Sequence: Synthetic peptide
  XENP022846 vlCDR2
GASSRAT

SEQ ID NO: 35721 - protein, 9 aa, Artificial Sequence
  Description of Artificial Sequence: Synthetic peptide
  XENP022846 vlCDR3
QQYGSSPWT

SEQ ID NO: 35722 - protein, 214 aa, Artificial Sequence; identical to SEQ ID NO: 22259
  Description of Artificial Sequence: Synthetic polypeptide
  XENP022846 2A11_H1.125_L2.126_Fab-[CTLA-4]_H3.23_L0.129_scFv Light Chain

SEQ ID NO: 35723 - protein, 107 aa, Artificial Sequence; identical to SEQ ID NO: 22260
  Description of Artificial Sequence: Synthetic polypeptide
  VL of XENP022846

SEQ ID NO: 35724 - protein, 11 aa, Artificial Sequence
  Description of Artificial Sequence: Synthetic peptide
  XENP022846 vlCDR1
QASQDIGNYLN

SEQ ID NO: 35725 - protein, 7 aa, Artificial Sequence
  Description of Artificial Sequence: Synthetic peptide
  XENP022846 vlCDR2
FTSYLHS

SEQ ID NO: 35726 - protein, 9 aa, Artificial Sequence
  Description of Artificial Sequence: Synthetic peptide
  XENP022846 vlCDR3
QEGNTLPYT

SEQ ID NO: 35727 - protein, 450 aa, Artificial Sequence
  Description of Artificial Sequence: Synthetic polypeptide
  XENP023223 7G8_H3.66_L1.34_Fab-[CTLA-4]_H3.23_L0.129_scFv Fab -Fc Heavy Chain
EVQLVESGGGLVQPGGSLRLSCAASGFTFDEAWMSWVRQAPGKGLEWVAEISTKANNHATYYAESVKGRFTISRDDSKSSVYLQMNSLRAEDTAVYYCTRLATWDWYFDVWGQGTTVTVSSASTKGPSVFPLAPSSKSTSGGTAALGCLVKDYFPEPVTVSWNSGALTSGVHTFPAVLQSSGLYSLSSVVTVPSSSLGTQTYICNVNHKPSDTKVDKKVEPKSCDKTHTCPPCPAPPVAGPSVFLFPPKPKDTLMISRTPEVTCVVVDVKHEDPEVKFNWYVDGVEVHNAKTKPREEEYNSTYRVVSVLTVLHQDWLNGKEYKCKVSNKALPAPIEKTISKAKGQPREPQVYTLPPSREEMTKNQVSLTCDVSGFYPSDIAVEWESDGQPENNYKTTPPVLDSDGSFFLYSKLTVDKSRWEQGDVFSCSVMHEALHNHYTQKSLSLSPGK

SEQ ID NO: 35728 - protein, 121 aa, Artificial Sequence; identical to SEQ ID NO: 35418
  Description of Artificial Sequence: Synthetic polypeptide
  VH of XENP023223

SEQ ID NO: 35729 - protein, 5 aa, Artificial Sequence
  Description of Artificial Sequence: Synthetic peptide
  XENP023223 vhCDR1
EAWMS

SEQ ID NO: 35730 - protein, 19 aa, Artificial Sequence
  Description of Artificial Sequence: Synthetic peptide
  XENP023223 vhCDR2
EISTKANNHATYYAESVKG

SEQ ID NO: 35731 - protein, 10 aa, Artificial Sequence
  Description of Artificial Sequence: Synthetic peptide
  XENP023223 vhCDR3
LATWDWYFDV

SEQ ID NO: 35732 - protein, 477 aa, Artificial Sequence; identical to SEQ ID NO: 21669
  Description of Artificial Sequence: Synthetic polypeptide
  XENP023223 7G8_H3.66_L1.34_Fab-[CTLA-4]_H3.23_L0.129_scFv scFv -Fc Heavy Chain

SEQ ID NO: 35733 - protein, 118 aa, Artificial Sequence; identical to SEQ ID NO: 2632
  Description of Artificial Sequence: Synthetic polypeptide
  VH of XENP023223

SEQ ID NO: 35734 - protein, 108 aa, Artificial Sequence; identical to SEQ ID NO: 2768
  Description of Artificial Sequence: Synthetic polypeptide
  VL of XENP023223

SEQ ID NO: 35735 - protein, 231 aa, Artificial Sequence; identical to SEQ ID NO: 21532
  Description of Artificial Sequence: Synthetic polypeptide
  Fc chain of XENP023223

SEQ ID NO: 35736 - protein, 5 aa, Artificial Sequence
  Description of Artificial Sequence: Synthetic peptide
  XENP023223 vhCDR1
SYTMH

SEQ ID NO: 35737 - protein, 17 aa, Artificial Sequence
  Description of Artificial Sequence: Synthetic peptide
  XENP023223 vhCDR2
FISYDGNYKYYADSVKG

SEQ ID NO: 35738 - protein, 9 aa, Artificial Sequence
  Description of Artificial Sequence: Synthetic peptide
  XENP023223 vhCDR3
GGHLGPFDL

SEQ ID NO: 35739 - protein, 12 aa, Artificial Sequence
  Description of Artificial Sequence: Synthetic peptide
  XENP023223 vlCDR1
RASQSVGSSYLA

SEQ ID NO: 35740 - protein, 7 aa, Artificial Sequence
  Description of Artificial Sequence: Synthetic peptide
  XENP023223 vlCDR2
GASSRAT

SEQ ID NO: 35741 - protein, 9 aa, Artificial Sequence
  Description of Artificial Sequence: Synthetic peptide
  XENP023223 vlCDR3
QQYGSSPWT

SEQ ID NO: 35742 - protein, 218 aa, Artificial Sequence; identical to SEQ ID NO: 22599
  Description of Artificial Sequence: Synthetic polypeptide
  XENP023223 7G8_H3.66_L1.34_Fab-[CTLA-4]_H3.23_L0.129_scFv Light Chain

SEQ ID NO: 35743 - protein, 111 aa, Artificial Sequence; identical to SEQ ID NO: 22600
  Description of Artificial Sequence: Synthetic polypeptide
  VL of XENP023223

SEQ ID NO: 35744 - protein, 15 aa, Artificial Sequence
  Description of Artificial Sequence: Synthetic peptide
  XENP023223 vlCDR1
RASQSVDYDGDSYMN

SEQ ID NO: 35745 - protein, 7 aa, Artificial Sequence
  Description of Artificial Sequence: Synthetic peptide
  XENP023223 vlCDR2
AASELES

SEQ ID NO: 35746 - protein, 9 aa, Artificial Sequence
  Description of Artificial Sequence: Synthetic peptide
  XENP023223 vlCDR3
QQSNEDPFT

SEQ ID NO: 35747 - protein, 450 aa, Artificial Sequence
  Description of Artificial Sequence: Synthetic polypeptide
  XENP023224 7G8_H3.67_L1.34_Fab-[CTLA-4]_H3.23_L0.129_scFv Fab -Fc Heavy Chain
EVQLVESGGGLVQPGGSLRLSCAASGFTFDDTWMSWVRQAPGKGLEWVAEISTKANNHATYYAESVKGRFTISRDDSKSSVYLQMNSLRAEDTAVYYCTRLATWDWYFDVWGQGTTVTVSSASTKGPSVFPLAPSSKSTSGGTAALGCLVKDYFPEPVTVSWNSGALTSGVHTFPAVLQSSGLYSLSSVVTVPSSSLGTQTYICNVNHKPSDTKVDKKVEPKSCDKTHTCPPCPAPPVAGPSVFLFPPKPKDTLMISRTPEVTCVVVDVKHEDPEVKFNWYVDGVEVHNAKTKPREEEYNSTYRVVSVLTVLHQDWLNGKEYKCKVSNKALPAPIEKTISKAKGQPREPQVYTLPPSREEMTKNQVSLTCDVSGFYPSDIAVEWESDGQPENNYKTTPPVLDSDGSFFLYSKLTVDKSRWEQGDVFSCSVMHEALHNHYTQKSLSLSPGK

SEQ ID NO: 35748 - protein, 121 aa, Artificial Sequence; identical to SEQ ID NO: 35428
  Description of Artificial Sequence: Synthetic polypeptide
  VH of XENP023224

SEQ ID NO: 35749 - protein, 5 aa, Artificial Sequence
  Description of Artificial Sequence: Synthetic peptide
  XENP023224 vhCDR1
DTWMS

SEQ ID NO: 35750 - protein, 19 aa, Artificial Sequence
  Description of Artificial Sequence: Synthetic peptide
  XENP023224 vhCDR2
EISTKANNHATYYAESVKG

SEQ ID NO: 35751 - protein, 10 aa, Artificial Sequence
  Description of Artificial Sequence: Synthetic peptide
  XENP023224 vhCDR3
LATWDWYFDV

SEQ ID NO: 35752 - protein, 477 aa, Artificial Sequence; identical to SEQ ID NO: 21669
  Description of Artificial Sequence: Synthetic polypeptide
  XENP023224 7G8_H3.67_L1.34_Fab-[CTLA-4]_H3.23_L0.129_scFv scFv -Fc Heavy Chain

SEQ ID NO: 35753 - protein, 118 aa, Artificial Sequence; identical to SEQ ID NO: 2632
  Description of Artificial Sequence: Synthetic polypeptide
  VH of XENP023224

SEQ ID NO: 35754 - protein, 108 aa, Artificial Sequence; identical to SEQ ID NO: 2768
  Description of Artificial Sequence: Synthetic polypeptide
  VL of XENP023224

SEQ ID NO: 35755 - protein, 231 aa, Artificial Sequence; identical to SEQ ID NO: 21532
  Description of Artificial Sequence: Synthetic polypeptide
  Fc chain of XENP023224

SEQ ID NO: 35756 - protein, 5 aa, Artificial Sequence
  Description of Artificial Sequence: Synthetic peptide
  XENP023224 vhCDR1
SYTMH

SEQ ID NO: 35757 - protein, 17 aa, Artificial Sequence
  Description of Artificial Sequence: Synthetic peptide
  XENP023224 vhCDR2
FISYDGNYKYYADSVKG

SEQ ID NO: 35758 - protein, 9 aa, Artificial Sequence
  Description of Artificial Sequence: Synthetic peptide
  XENP023224 vhCDR3
GGHLGPFDL

SEQ ID NO: 35759 - protein, 12 aa, Artificial Sequence
  Description of Artificial Sequence: Synthetic peptide
  XENP023224 vlCDR1
RASQSVGSSYLA

SEQ ID NO: 35760 - protein, 7 aa, Artificial Sequence
  Description of Artificial Sequence: Synthetic peptide
  XENP023224 vlCDR2
GASSRAT

SEQ ID NO: 35761 - protein, 9 aa, Artificial Sequence
  Description of Artificial Sequence: Synthetic peptide
  XENP023224 vlCDR3
QQYGSSPWT

SEQ ID NO: 35762 - protein, 218 aa, Artificial Sequence; identical to SEQ ID NO: 22599
  Description of Artificial Sequence: Synthetic polypeptide
  XENP023224 7G8_H3.67_L1.34_Fab-[CTLA-4]_H3.23_L0.129_scFv Light Chain

SEQ ID NO: 35763 - protein, 111 aa, Artificial Sequence; identical to SEQ ID NO: 22600
  Description of Artificial Sequence: Synthetic polypeptide
  VL of XENP023224

SEQ ID NO: 35764 - protein, 15 aa, Artificial Sequence
  Description of Artificial Sequence: Synthetic peptide
  XENP023224 vlCDR1
RASQSVDYDGDSYMN

SEQ ID NO: 35765 - protein, 7 aa, Artificial Sequence
  Description of Artificial Sequence: Synthetic peptide
  XENP023224 vlCDR2
AASELES

SEQ ID NO: 35766 - protein, 9 aa, Artificial Sequence
  Description of Artificial Sequence: Synthetic peptide
  XENP023224 vlCDR3
QQSNEDPFT

SEQ ID NO: 35767 - protein, 450 aa, Artificial Sequence
  Description of Artificial Sequence: Synthetic polypeptide
  XENP023225 7G8_H3.71_L1.34_Fab-[CTLA-4]_H3.23_L0.129_scFv Fab-Fc Heavy Chain
EVQLVESGGGLVQPGGSLRLSCAASGFTFDDAWMSWVRQAPGKGLEWVAEISTKAYNHATYYAESVKGRFTISRDDSKSSVYLQMNSLRAEDTAVYYCTRLATWDWYFDVWGQGTTVTVSSASTKGPSVFPLAPSSKSTSGGTAALGCLVKDYFPEPVTVSWNSGALTSGVHTFPAVLQSSGLYSLSSVVTVPSSSLGTQTYICNVNHKPSDTKVDKKVEPKSCDKTHTCPPCPAPPVAGPSVFLFPPKPKDTLMISRTPEVTCVVVDVKHEDPEVKFNWYVDGVEVHNAKTKPREEEYNSTYRVVSVLTVLHQDWLNGKEYKCKVSNKALPAPIEKTISKAKGQPREPQVYTLPPSREEMTKNQVSLTCDVSGFYPSDIAVEWESDGQPENNYKTTPPVLDSDGSFFLYSKLTVDKSRWEQGDVFSCSVMHEALHNHYTQKSLSLSPGK

SEQ ID NO: 35768 - protein, 121 aa, Artificial Sequence; identical to SEQ ID NO: 35468
  Description of Artificial Sequence: Synthetic polypeptide
  VH of XENP023225

SEQ ID NO: 35769 - protein, 5 aa, Artificial Sequence
  Description of Artificial Sequence: Synthetic peptide
  XENP023225 vhCDR1
DAWMS

SEQ ID NO: 35770 - protein, 19 aa, Artificial Sequence
  Description of Artificial Sequence: Synthetic peptide
  XENP023225 vhCDR2
EISTKAYNHATYYAESVKG

SEQ ID NO: 35771 - protein, 10 aa, Artificial Sequence
  Description of Artificial Sequence: Synthetic peptide
  XENP023225 vhCDR3
LATWDWYFDV

SEQ ID NO: 35772 - protein, 477 aa, Artificial Sequence; identical to SEQ ID NO: 21669
  Description of Artificial Sequence: Synthetic polypeptide
  XENP023225 7G8_H3.71_L1.34_Fab-[CTLA-4]_H3.23_L0.129_scFv scFv -Fc Heavy Chain

SEQ ID NO: 35773 - protein, 118 aa, Artificial Sequence; identical to SEQ ID NO: 2632
  Description of Artificial Sequence: Synthetic polypeptide
  VH of XENP023225

SEQ ID NO: 35774 - protein, 108 aa, Artificial Sequence; identical to SEQ ID NO: 2768
  Description of Artificial Sequence: Synthetic polypeptide
  VL of XENP023225

SEQ ID NO: 35775 - protein, 231 aa, Artificial Sequence; identical to SEQ ID NO: 21532
  Description of Artificial Sequence: Synthetic polypeptide
  Fc chain of XENP023225

SEQ ID NO: 35776 - protein, 5 aa, Artificial Sequence
  Description of Artificial Sequence: Synthetic peptide
  XENP023225 vhCDR1
SYTMH

SEQ ID NO: 35777 - protein, 17 aa, Artificial Sequence
  Description of Artificial Sequence: Synthetic peptide
  XENP023225 vhCDR2
FISYDGNYKYYADSVKG

SEQ ID NO: 35778 - protein, 9 aa, Artificial Sequence
  Description of Artificial Sequence: Synthetic peptide
  XENP023225 vhCDR3
GGHLGPFDL

SEQ ID NO: 35779 - protein, 12 aa, Artificial Sequence
  Description of Artificial Sequence: Synthetic peptide
  XENP023225 vlCDR1
RASQSVGSSYLA

SEQ ID NO: 35780 - protein, 7 aa, Artificial Sequence
  Description of Artificial Sequence: Synthetic peptide
  XENP023225 vlCDR2
GASSRAT

SEQ ID NO: 35781 - protein, 9 aa, Artificial Sequence
  Description of Artificial Sequence: Synthetic peptide
  XENP023225 vlCDR3
QQYGSSPWT

SEQ ID NO: 35782 - protein, 218 aa, Artificial Sequence; identical to SEQ ID NO: 22599
  Description of Artificial Sequence: Synthetic polypeptide
  XENP023225 7G8_H3.71_L1.34_Fab-[CTLA-4]_H3.23_L0.129_scFv Light Chain

SEQ ID NO: 35783 - protein, 111 aa, Artificial Sequence; identical to SEQ ID NO: 22600
  Description of Artificial Sequence: Synthetic polypeptide
  VL of XENP023225

SEQ ID NO: 35784 - protein, 15 aa, Artificial Sequence
  Description of Artificial Sequence: Synthetic peptide
  XENP023225 vlCDR1
RASQSVDYDGDSYMN

SEQ ID NO: 35785 - protein, 7 aa, Artificial Sequence
  Description of Artificial Sequence: Synthetic peptide
  XENP023225 vlCDR2
AASELES

SEQ ID NO: 35786 - protein, 9 aa, Artificial Sequence
  Description of Artificial Sequence: Synthetic peptide
  XENP023225 vlCDR3
QQSNEDPFT

SEQ ID NO: 35787 - protein, 450 aa, Artificial Sequence; identical to SEQ ID NO: 22484
  Description of Artificial Sequence: Synthetic polypeptide
  XENP023226 7G8_H3.30_L1.39_Fab-[CTLA-4]_H3.23_L0.129_scFv Fab- Fc Heavy Chain

SEQ ID NO: 35788 - protein, 121 aa, Artificial Sequence; identical to SEQ ID NO: 22485
  Description of Artificial Sequence: Synthetic polypeptide
  VH of XENP023226

SEQ ID NO: 35789 - protein, 5 aa, Artificial Sequence
  Description of Artificial Sequence: Synthetic peptide
  XENP023226 vhCDR1
DAWMS

SEQ ID NO: 35790 - protein, 19 aa, Artificial Sequence
  Description of Artificial Sequence: Synthetic peptide
  XENP023226 vhCDR2
EISTKANNHATYYAESVKG

SEQ ID NO: 35791 - protein, 10 aa, Artificial Sequence
  Description of Artificial Sequence: Synthetic peptide
  XENP023226 vhCDR3
LATWDWYFDV

SEQ ID NO: 35792 - protein, 477 aa, Artificial Sequence; identical to SEQ ID NO: 21669
  Description of Artificial Sequence: Synthetic polypeptide
  XENP023226 7G8_H3.30_L1.39_Fab-[CTLA-4]_H3.23_L0.129_scFv scFv -Fc Heavy Chain

SEQ ID NO: 35793 - protein, 118 aa, Artificial Sequence; identical to SEQ ID NO: 2632
  Description of Artificial Sequence: Synthetic polypeptide
  VH of XENP023226

SEQ ID NO: 35794 - protein, 108 aa, Artificial Sequence; identical to SEQ ID NO: 2768
  Description of Artificial Sequence: Synthetic polypeptide
  VL of XENP023226

SEQ ID NO: 35795 - protein, 231 aa, Artificial Sequence; identical to SEQ ID NO: 21532
  Description of Artificial Sequence: Synthetic polypeptide
  Fc chain of XENP023226

SEQ ID NO: 35796 - protein, 5 aa, Artificial Sequence
  Description of Artificial Sequence: Synthetic peptide
  XENP023226 vhCDR1
SYTMH

SEQ ID NO: 35797 - protein, 17 aa, Artificial Sequence
  Description of Artificial Sequence: Synthetic peptide
  XENP023226 vhCDR2
FISYDGNYKYYADSVKG

SEQ ID NO: 35798 - protein, 9 aa, Artificial Sequence
  Description of Artificial Sequence: Synthetic peptide
  XENP023226 vhCDR3
GGHLGPFDL

SEQ ID NO: 35799 - protein, 12 aa, Artificial Sequence
  Description of Artificial Sequence: Synthetic peptide
  XENP023226 vlCDR1
RASQSVGSSYLA

SEQ ID NO: 35800 - protein, 7 aa, Artificial Sequence
  Description of Artificial Sequence: Synthetic peptide
  XENP023226 vlCDR2
GASSRAT

SEQ ID NO: 35801 - protein, 9 aa, Artificial Sequence
  Description of Artificial Sequence: Synthetic peptide
  XENP023226 vlCDR3
QQYGSSPWT

SEQ ID NO: 35802 - protein, 218 aa, Artificial Sequence; identical to SEQ ID NO: 35532
  Description of Artificial Sequence: Synthetic polypeptide
  XENP023226 7G8_H3.30_L1.39_Fab-[CTLA-4]_H3.23_L0.129_scFv Light Chain

SEQ ID NO: 35803 - protein, 111 aa, Artificial Sequence; identical to SEQ ID NO: 35533
  Description of Artificial Sequence: Synthetic polypeptide
  VL of XENP023226

SEQ ID NO: 35804 - protein, 15 aa, Artificial Sequence
  Description of Artificial Sequence: Synthetic peptide
  XENP023226 vlCDR1
RASQSVDYYGDSYMN

SEQ ID NO: 35805 - protein, 7 aa, Artificial Sequence
  Description of Artificial Sequence: Synthetic peptide
  XENP023226 vlCDR2
AASELES

SEQ ID NO: 35806 - protein, 9 aa, Artificial Sequence
  Description of Artificial Sequence: Synthetic peptide
  XENP023226 vlCDR3
QQSNEDPFT

SEQ ID NO: 35807 - protein, 450 aa, Artificial Sequence; identical to SEQ ID NO: 35727
  Description of Artificial Sequence: Synthetic polypeptide
  XENP023227 7G8_H3.66_L1.39_Fab-[CTLA-4]_H3.23_L0.129_scFv Fab -Fc Heavy Chain

SEQ ID NO: 35808 - protein, 121 aa, Artificial Sequence; identical to SEQ ID NO: 35418
  Description of Artificial Sequence: Synthetic polypeptide
  VH of XENP023227

SEQ ID NO: 35809 - protein, 5 aa, Artificial Sequence
  Description of Artificial Sequence: Synthetic peptide
  XENP023227 vhCDR1
EAWMS

SEQ ID NO: 35810 - protein, 19 aa, Artificial Sequence
  Description of Artificial Sequence: Synthetic peptide
  XENP023227 vhCDR2
EISTKANNHATYYAESVKG

SEQ ID NO: 35811 - protein, 10 aa, Artificial Sequence
  Description of Artificial Sequence: Synthetic peptide
  XENP023227 vhCDR3
LATWDWYFDV

SEQ ID NO: 35812 - protein, 477 aa, Artificial Sequence; identical to SEQ ID NO: 21669
  Description of Artificial Sequence: Synthetic polypeptide
  XENP023227 7G8_H3.66_L1.39_Fab-[CTLA-4]_H3.23_L0.129_scFv scFv -Fc Heavy Chain

SEQ ID NO: 35813 - protein, 118 aa, Artificial Sequence; identical to SEQ ID NO: 2632
  Description of Artificial Sequence: Synthetic polypeptide
  VH of XENP023227

SEQ ID NO: 35814 - protein, 108 aa, Artificial Sequence; identical to SEQ ID NO: 2768
  Description of Artificial Sequence: Synthetic polypeptide
  VL of XENP023227

SEQ ID NO: 35815 - protein, 231 aa, Artificial Sequence; identical to SEQ ID NO: 21532
  Description of Artificial Sequence: Synthetic polypeptide
  Fc chain of XENP023227

SEQ ID NO: 35816 - protein, 5 aa, Artificial Sequence
  Description of Artificial Sequence: Synthetic peptide
  XENP023227 vhCDR1
SYTMH

SEQ ID NO: 35817 - protein, 17 aa, Artificial Sequence
  Description of Artificial Sequence: Synthetic peptide
  XENP023227 vhCDR2
FISYDGNYKYYADSVKG

SEQ ID NO: 35818 - protein, 9 aa, Artificial Sequence
  Description of Artificial Sequence: Synthetic peptide
  XENP023227 vhCDR3
GGHLGPFDL

SEQ ID NO: 35819 - protein, 12 aa, Artificial Sequence
  Description of Artificial Sequence: Synthetic peptide
  XENP023227 vlCDR1
RASQSVGSSYLA

SEQ ID NO: 35820 - protein, 7 aa, Artificial Sequence
  Description of Artificial Sequence: Synthetic peptide
  XENP023227 vlCDR2
GASSRAT

SEQ ID NO: 35821 - protein, 9 aa, Artificial Sequence
  Description of Artificial Sequence: Synthetic peptide
  XENP023227 vlCDR3
QQYGSSPWT

SEQ ID NO: 35822 - protein, 218 aa, Artificial Sequence; identical to SEQ ID NO: 35532
  Description of Artificial Sequence: Synthetic polypeptide
  XENP023227 7G8_H3.66_L1.39_Fab-[CTLA-4]_H3.23_L0.129_scFv Light Chain

SEQ ID NO: 35823 - protein, 111 aa, Artificial Sequence; identical to SEQ ID NO: 35533
  Description of Artificial Sequence: Synthetic polypeptide
  VL of XENP023227

SEQ ID NO: 35824 - protein, 15 aa, Artificial Sequence
  Description of Artificial Sequence: Synthetic peptide
  XENP023227 vlCDR1
RASQSVDYYGDSYMN

SEQ ID NO: 35825 - protein, 7 aa, Artificial Sequence
  Description of Artificial Sequence: Synthetic peptide
  XENP023227 vlCDR2
AASELES

SEQ ID NO: 35826 - protein, 9 aa, Artificial Sequence
  Description of Artificial Sequence: Synthetic peptide
  XENP023227 vlCDR3
QQSNEDPFT

SEQ ID NO: 35827 - protein, 450 aa, Artificial Sequence; identical to SEQ ID NO: 35747
  Description of Artificial Sequence: Synthetic polypeptide
  XENP023228 7G8_H3.67_L1.39_Fab-[CTLA-4]_H3.23_L0.129_scFv Fab- Fc Heavy Chain

SEQ ID NO: 35828 - protein, 121 aa, Artificial Sequence; identical to SEQ ID NO: 35428
  Description of Artificial Sequence: Synthetic polypeptide
  VH of XENP023228

SEQ ID NO: 35829 - protein, 5 aa, Artificial Sequence
  Description of Artificial Sequence: Synthetic peptide
  XENP023228 vhCDR1
DTWMS

SEQ ID NO: 35830 - protein, 19 aa, Artificial Sequence
  Description of Artificial Sequence: Synthetic peptide
  XENP023228 vhCDR2
EISTKANNHATYYAESVKG

SEQ ID NO: 35831 - protein, 10 aa, Artificial Sequence
  Description of Artificial Sequence: Synthetic peptide
  XENP023228 vhCDR3
LATWDWYFDV

SEQ ID NO: 35832 - protein, 477 aa, Artificial Sequence; identical to SEQ ID NO: 21669
  Description of Artificial Sequence: Synthetic polypeptide
  XENP023228 7G8_H3.67_L1.39_Fab-[CTLA-4]_H3.23_L0.129_scFv scFv -Fc Heavy Chain

SEQ ID NO: 35833 - protein, 118 aa, Artificial Sequence; identical to SEQ ID NO: 2632
  Description of Artificial Sequence: Synthetic polypeptide
  VH of XENP023228

SEQ ID NO: 35834 - protein, 108 aa, Artificial Sequence; identical to SEQ ID NO: 2768
  Description of Artificial Sequence: Synthetic polypeptide
  VL of XENP023228

SEQ ID NO: 35835 - protein, 231 aa, Artificial Sequence; identical to SEQ ID NO: 21532
  Description of Artificial Sequence: Synthetic polypeptide
  Fc chain of XENP023228

SEQ ID NO: 35836 - protein, 5 aa, Artificial Sequence
  Description of Artificial Sequence: Synthetic peptide
  XENP023228 vhCDR1
SYTMH

SEQ ID NO: 35837 - protein, 17 aa, Artificial Sequence
  Description of Artificial Sequence: Synthetic peptide
  XENP023228 vhCDR2
FISYDGNYKYYADSVKG

SEQ ID NO: 35838 - protein, 9 aa, Artificial Sequence
  Description of Artificial Sequence: Synthetic peptide
  XENP023228 vhCDR3
GGHLGPFDL

SEQ ID NO: 35839 - protein, 12 aa, Artificial Sequence
  Description of Artificial Sequence: Synthetic peptide
  XENP023228 vlCDR1
RASQSVGSSYLA

SEQ ID NO: 35840 - protein, 7 aa, Artificial Sequence
  Description of Artificial Sequence: Synthetic peptide
  XENP023228 vlCDR2
GASSRAT

SEQ ID NO: 35841 - protein, 9 aa, Artificial Sequence
  Description of Artificial Sequence: Synthetic peptide
  XENP023228 vlCDR3
QQYGSSPWT

SEQ ID NO: 35842 - protein, 218 aa, Artificial Sequence; identical to SEQ ID NO: 35532
  Description of Artificial Sequence: Synthetic polypeptide
  XENP023228 7G8_H3.67_L1.39_Fab-[CTLA-4]_H3.23_L0.129_scFv Light Chain

SEQ ID NO: 35843 - protein, 111 aa, Artificial Sequence; identical to SEQ ID NO: 35533
  Description of Artificial Sequence: Synthetic polypeptide
  VL of XENP023228

SEQ ID NO: 35844 - protein, 15 aa, Artificial Sequence
  Description of Artificial Sequence: Synthetic peptide
  XENP023228 vlCDR1
RASQSVDYYGDSYMN

SEQ ID NO: 35845 - protein, 7 aa, Artificial Sequence
  Description of Artificial Sequence: Synthetic peptide
  XENP023228 vlCDR2
AASELES

SEQ ID NO: 35846 - protein, 9 aa, Artificial Sequence
  Description of Artificial Sequence: Synthetic peptide
  XENP023228 vlCDR3
QQSNEDPFT

SEQ ID NO: 35847 - protein, 450 aa, Artificial Sequence; identical to SEQ ID NO: 35767
  Description of Artificial Sequence: Synthetic polypeptide
  XENP023229 7G8_H3.71_L1.39_Fab-[CTLA-4]_H3.23_L0.129_scFv Fab -Fc Heavy Chain

SEQ ID NO: 35848 - protein, 121 aa, Artificial Sequence; identical to SEQ ID NO: 35468
  Description of Artificial Sequence: Synthetic polypeptide
  VH of XENP023229

SEQ ID NO: 35849 - protein, 5 aa, Artificial Sequence
  Description of Artificial Sequence: Synthetic peptide
  XENP023229 vhCDR1
DAWMS

SEQ ID NO: 35850 - protein, 19 aa, Artificial Sequence
  Description of Artificial Sequence: Synthetic peptide
  XENP023229 vhCDR2
EISTKAYNHATYYAESVKG

SEQ ID NO: 35851 - protein, 10 aa, Artificial Sequence
  Description of Artificial Sequence: Synthetic peptide
  XENP023229 vhCDR3
LATWDWYFDV

SEQ ID NO: 35852 - protein, 477 aa, Artificial Sequence; identical to SEQ ID NO: 21669
  Description of Artificial Sequence: Synthetic polypeptide
  XENP023229 7G8_H3.71_L1.39_Fab-[CTLA-4]_H3.23_L0.129_scFv scFv -Fc Heavy Chain

SEQ ID NO: 35853 - protein, 118 aa, Artificial Sequence; identical to SEQ ID NO: 2632
  Description of Artificial Sequence: Synthetic polypeptide
  VH of XENP023229

SEQ ID NO: 35854 - protein, 108 aa, Artificial Sequence; identical to SEQ ID NO: 2768
  Description of Artificial Sequence: Synthetic polypeptide
  VL of XENP023229

SEQ ID NO: 35855 - protein, 231 aa, Artificial Sequence; identical to SEQ ID NO: 21532
  Description of Artificial Sequence: Synthetic polypeptide
  Fc chain of XENP023229

SEQ ID NO: 35856 - protein, 5 aa, Artificial Sequence
  Description of Artificial Sequence: Synthetic peptide
  XENP023229 vhCDR1
SYTMH

SEQ ID NO: 35857 - protein, 17 aa, Artificial Sequence
  Description of Artificial Sequence: Synthetic peptide
  XENP023229 vhCDR2
FISYDGNYKYYADSVKG

SEQ ID NO: 35858 - protein, 9 aa, Artificial Sequence
  Description of Artificial Sequence: Synthetic peptide
  XENP023229 vhCDR3
GGHLGPFDL

SEQ ID NO: 35859 - protein, 12 aa, Artificial Sequence
  Description of Artificial Sequence: Synthetic peptide
  XENP023229 vlCDR1
RASQSVGSSYLA

SEQ ID NO: 35860 - protein, 7 aa, Artificial Sequence
  Description of Artificial Sequence: Synthetic peptide
  XENP023229 vlCDR2
GASSRAT

SEQ ID NO: 35861 - protein, 9 aa, Artificial Sequence
  Description of Artificial Sequence: Synthetic peptide
  XENP023229 vlCDR3
QQYGSSPWT

SEQ ID NO: 35862 - protein, 218 aa, Artificial Sequence; identical to SEQ ID NO: 35532
  Description of Artificial Sequence: Synthetic polypeptide
  XENP023229 7G8_H3.71_L1.39_Fab-[CTLA-4]_H3.23_L0.129_scFv Light Chain

SEQ ID NO: 35863 - protein, 111 aa, Artificial Sequence; identical to SEQ ID NO: 35533
  Description of Artificial Sequence: Synthetic polypeptide
  VL of XENP023229

SEQ ID NO: 35864 - protein, 15 aa, Artificial Sequence
  Description of Artificial Sequence: Synthetic peptide
  XENP023229 vlCDR1
RASQSVDYYGDSYMN

SEQ ID NO: 35865 - protein, 7 aa, Artificial Sequence
  Description of Artificial Sequence: Synthetic peptide
  XENP023229 vlCDR2
AASELES

SEQ ID NO: 35866 - protein, 9 aa, Artificial Sequence
  Description of Artificial Sequence: Synthetic peptide
  XENP023229 vlCDR3
QQSNEDPFT

SEQ ID NO: 35867 - protein, 447 aa, Artificial Sequence; identical to SEQ ID NO: 22084
  Description of Artificial Sequence: Synthetic polypeptide
  XENP022718 2A11_H1.144_L2_Fab-1G6_L1.194_H1.279_scFv Fab-Fc Heavy Chain

SEQ ID NO: 35868 - protein, 118 aa, Artificial Sequence; identical to SEQ ID NO: 22085
  Description of Artificial Sequence: Synthetic polypeptide
  VH of XENP022718

SEQ ID NO: 35869 - protein, 5 aa, Artificial Sequence
  Description of Artificial Sequence: Synthetic peptide
  XENP022718 vhCDR1
DYFMH

SEQ ID NO: 35870 - protein, 17 aa, Artificial Sequence
  Description of Artificial Sequence: Synthetic peptide
  XENP022718 vhCDR2
WIDPELGDTEYAPKFQG

SEQ ID NO: 35871 - protein, 9 aa, Artificial Sequence
  Description of Artificial Sequence: Synthetic peptide
  XENP022718 vhCDR3
RGVYQALDY

SEQ ID NO: 35872 - protein, 480 aa, Artificial Sequence; identical to SEQ ID NO: 23221
  Description of Artificial Sequence: Synthetic polypeptide
  XENP022718 2A11_H1.144_L2_Fab-1G6_L1.194_H1.279_scFv scFv-Fc Heavy Chain

SEQ ID NO: 35873 - protein, 107 aa, Artificial Sequence; identical to SEQ ID NO: 10999
  Description of Artificial Sequence: Synthetic polypeptide
  VH of XENP022718

SEQ ID NO: 35874 - protein, 122 aa, Artificial Sequence; identical to SEQ ID NO: 10908
  Description of Artificial Sequence: Synthetic polypeptide
  VL of XENP022718

SEQ ID NO: 35875 - protein, 231 aa, Artificial Sequence; identical to SEQ ID NO: 21532
  Description of Artificial Sequence: Synthetic polypeptide
  Fc chain of XENP022718

SEQ ID NO: 35876 - protein, 11 aa, Artificial Sequence
  Description of Artificial Sequence: Synthetic peptide
  XENP022718 vhCDR1
RASQSVGNDVA

SEQ ID NO: 35877 - protein, 7 aa, Artificial Sequence
  Description of Artificial Sequence: Synthetic peptide
  XENP022718 vhCDR2
YASHRYT

SEQ ID NO: 35878 - protein, 9 aa, Artificial Sequence
  Description of Artificial Sequence: Synthetic peptide
  XENP022718 vhCDR3
QQDFSSPRT

SEQ ID NO: 35879 - protein, 5 aa, Artificial Sequence
  Description of Artificial Sequence: Synthetic peptide
  XENP022718 vlCDR1
NYWMN

SEQ ID NO: 35880 - protein, 19 aa, Artificial Sequence
  Description of Artificial Sequence: Synthetic peptide
  XENP022718 vlCDR2
EIRLYSNNYATHYAESVKG

SEQ ID NO: 35881 - protein, 11 aa, Artificial Sequence
  Description of Artificial Sequence: Synthetic peptide
  XENP022718 vlCDR3
YYGNYGGYFDV

SEQ ID NO: 35882 - protein, 214 aa, Artificial Sequence; identical to SEQ ID NO: 17250
  Description of Artificial Sequence: Synthetic polypeptide
  XENP022718 2A11_H1.144_L2_Fab-1G6_L1.194_H1.279_scFv Light Chain

SEQ ID NO: 35883 - protein, 107 aa, Artificial Sequence; identical to SEQ ID NO: 17251
  Description of Artificial Sequence: Synthetic polypeptide
  VL of XENP022718

SEQ ID NO: 35884 - protein, 11 aa, Artificial Sequence
  Description of Artificial Sequence: Synthetic peptide
  XENP022718 vlCDR1
QASQDIGNYLN

SEQ ID NO: 35885 - protein, 7 aa, Artificial Sequence
  Description of Artificial Sequence: Synthetic peptide
  XENP022718 vlCDR2
YTSRLHS

SEQ ID NO: 35886 - protein, 9 aa, Artificial Sequence
  Description of Artificial Sequence: Synthetic peptide
  XENP022718 vlCDR3
QQGNTLPYT

SEQ ID NO: 35887 - protein, 447 aa, Artificial Sequence; identical to SEQ ID NO: 17235
  Description of Artificial Sequence: Synthetic polypeptide
  XENP022719 2A11_H1_L2.50_Fab-1G6_L1.194_H1.279_scFv Fab-Fc Heavy Chain

SEQ ID NO: 35888 - protein, 118 aa, Artificial Sequence; identical to SEQ ID NO: 17236
  Description of Artificial Sequence: Synthetic polypeptide
  VH of XENP022719

SEQ ID NO: 35889 - protein, 5 aa, Artificial Sequence
  Description of Artificial Sequence: Synthetic peptide
  XENP022719 vhCDR1
DYYMH

SEQ ID NO: 35890 - protein, 17 aa, Artificial Sequence
  Description of Artificial Sequence: Synthetic peptide
  XENP022719 vhCDR2
WIDPENGDTEYAPKFQG

SEQ ID NO: 35891 - protein, 9 aa, Artificial Sequence
  Description of Artificial Sequence: Synthetic peptide
  XENP022719 vhCDR3
RGVRQALDY

SEQ ID NO: 35892 - protein, 480 aa, Artificial Sequence; identical to SEQ ID NO: 23221
  Description of Artificial Sequence: Synthetic polypeptide
  XENP022719 2A11_H1_L2.50_Fab-1G6_L1.194_H1.279_scFv scFv-Fc Heavy Chain

SEQ ID NO: 35893 - protein, 107 aa, Artificial Sequence; identical to SEQ ID NO: 10999
  Description of Artificial Sequence: Synthetic polypeptide
  VH of XENP022719

SEQ ID NO: 35894 - protein, 122 aa, Artificial Sequence; identical to SEQ ID NO: 10908
  Description of Artificial Sequence: Synthetic polypeptide
  VL of XENP022719

SEQ ID NO: 35895 - protein, 231 aa, Artificial Sequence; identical to SEQ ID NO: 21532
  Description of Artificial Sequence: Synthetic polypeptide
  Fc chain of XENP022719

SEQ ID NO: 35896 - protein, 11 aa, Artificial Sequence
  Description of Artificial Sequence: Synthetic peptide
  XENP022719 vhCDR1
RASQSVGNDVA

SEQ ID NO: 35897 - protein, 7 aa, Artificial Sequence
  Description of Artificial Sequence: Synthetic peptide
  XENP022719 vhCDR2
YASHRYT

SEQ ID NO: 35898 - protein, 9 aa, Artificial Sequence
  Description of Artificial Sequence: Synthetic peptide
  XENP022719 vhCDR3
QQDFSSPRT

SEQ ID NO: 35899 - protein, 5 aa, Artificial Sequence
  Description of Artificial Sequence: Synthetic peptide
  XENP022719 vlCDR1
NYWMN

SEQ ID NO: 35900 - protein, 19 aa, Artificial Sequence
  Description of Artificial Sequence: Synthetic peptide
  XENP022719 vlCDR2
EIRLYSNNYATHYAESVKG

SEQ ID NO: 35901 - protein, 11 aa, Artificial Sequence
  Description of Artificial Sequence: Synthetic peptide
  XENP022719 vlCDR3
YYGNYGGYFDV

SEQ ID NO: 35902 - protein, 214 aa, Artificial Sequence; identical to SEQ ID NO: 22059
  Description of Artificial Sequence: Synthetic polypeptide
  XENP022719 2A11_H1_L2.50_Fab-1G6_L1.194_H1.279_scFv Light Chain

SEQ ID NO: 35903 - protein, 107 aa, Artificial Sequence; identical to SEQ ID NO: 22060
  Description of Artificial Sequence: Synthetic polypeptide
  VL of XENP022719

SEQ ID NO: 35904 - protein, 11 aa, Artificial Sequence
  Description of Artificial Sequence: Synthetic peptide
  XENP022719 vlCDR1
QASQDIGNYLN

SEQ ID NO: 35905 - protein, 7 aa, Artificial Sequence
  Description of Artificial Sequence: Synthetic peptide
  XENP022719 vlCDR2
YTSYLHS

SEQ ID NO: 35906 - protein, 9 aa, Artificial Sequence
  Description of Artificial Sequence: Synthetic peptide
  XENP022719 vlCDR3
QQGNTLPYT

SEQ ID NO: 35907 - protein, 447 aa, Artificial Sequence; identical to SEQ ID NO: 17235
  Description of Artificial Sequence: Synthetic polypeptide
  XENP022720 2A11_H1_L2.113_Fab-1G6_L1.194_H1.279_scFv Fab-Fc Heavy Chain

SEQ ID NO: 35908 - protein, 118 aa, Artificial Sequence; identical to SEQ ID NO: 17236
  Description of Artificial Sequence: Synthetic polypeptide
  VH of XENP022720

SEQ ID NO: 35909 - protein, 5 aa, Artificial Sequence
  Description of Artificial Sequence: Synthetic peptide
  XENP022720 vhCDR1
DYYMH

SEQ ID NO: 35910 - protein, 17 aa, Artificial Sequence
  Description of Artificial Sequence: Synthetic peptide
  XENP022720 vhCDR2
WIDPENGDTEYAPKFQG

SEQ ID NO: 35911 - protein, 9 aa, Artificial Sequence
  Description of Artificial Sequence: Synthetic peptide
  XENP022720 vhCDR3
RGVRQALDY

SEQ ID NO: 35912 - protein, 480 aa, Artificial Sequence; identical to SEQ ID NO: 23221
  Description of Artificial Sequence: Synthetic polypeptide
  XENP022720 2A11_H1_L2.113_Fab-1G6_L1.194_H1.279_scFv scFv-Fc Heavy Chain

SEQ ID NO: 35913 - protein, 107 aa, Artificial Sequence; identical to SEQ ID NO: 10999
  Description of Artificial Sequence: Synthetic polypeptide
  VH of XENP022720

SEQ ID NO: 35914 - protein, 122 aa, Artificial Sequence; identical to SEQ ID NO: 10908
  Description of Artificial Sequence: Synthetic polypeptide
  VL of XENP022720

SEQ ID NO: 35915 - protein, 231 aa, Artificial Sequence; identical to SEQ ID NO: 21532
  Description of Artificial Sequence: Synthetic polypeptide
  Fc chain of XENP022720

SEQ ID NO: 35916 - protein, 11 aa, Artificial Sequence
  Description of Artificial Sequence: Synthetic peptide
  XENP022720 vhCDR1
RASQSVGNDVA

SEQ ID NO: 35917 - protein, 7 aa, Artificial Sequence
  Description of Artificial Sequence: Synthetic peptide
  XENP022720 vhCDR2
YASHRYT

SEQ ID NO: 35918 - protein, 9 aa, Artificial Sequence
  Description of Artificial Sequence: Synthetic peptide
  XENP022720 vhCDR3
QQDFSSPRT

SEQ ID NO: 35919 - protein, 5 aa, Artificial Sequence
  Description of Artificial Sequence: Synthetic peptide
  XENP022720 vlCDR1
NYWMN

SEQ ID NO: 35920 - protein, 19 aa, Artificial Sequence
  Description of Artificial Sequence: Synthetic peptide
  XENP022720 vlCDR2
EIRLYSNNYATHYAESVKG

SEQ ID NO: 35921 - protein, 11 aa, Artificial Sequence
  Description of Artificial Sequence: Synthetic peptide
  XENP022720 vlCDR3
YYGNYGGYFDV

SEQ ID NO: 35922 - protein, 214 aa, Artificial Sequence; identical to SEQ ID NO: 22079
  Description of Artificial Sequence: Synthetic polypeptide
  XENP022720 2A11_H1_L2.113_Fab-1G6_L1.194_H1.279_scFv Light Chain

SEQ ID NO: 35923 - protein, 107 aa, Artificial Sequence; identical to SEQ ID NO: 22080
  Description of Artificial Sequence: Synthetic polypeptide
  VL of XENP022720

SEQ ID NO: 35924 - protein, 11 aa, Artificial Sequence
  Description of Artificial Sequence: Synthetic peptide
  XENP022720 vlCDR1
QASQDIGNYLN

SEQ ID NO: 35925 - protein, 7 aa, Artificial Sequence
  Description of Artificial Sequence: Synthetic peptide
  XENP022720 vlCDR2
FTSYLHS

SEQ ID NO: 35926 - protein, 9 aa, Artificial Sequence
  Description of Artificial Sequence: Synthetic peptide
  XENP022720 vlCDR3
QQGNTLPYT

SEQ ID NO: 35927 - protein, 450 aa, Artificial Sequence; identical to SEQ ID NO: 35607
  Description of Artificial Sequence: Synthetic polypeptide
  XENP022847 7G8_H3.30_L1.34_Fab-1G6_L1.194_H1.279_scFv Fab-Fc Heavy Chain

SEQ ID NO: 35928 - protein, 121 aa, Artificial Sequence; identical to SEQ ID NO: 22485
  Description of Artificial Sequence: Synthetic polypeptide
  VH of XENP022847

SEQ ID NO: 35929 - protein, 5 aa, Artificial Sequence
  Description of Artificial Sequence: Synthetic peptide
  XENP022847 vhCDR1
DAWMS

SEQ ID NO: 35930 - protein, 19 aa, Artificial Sequence
  Description of Artificial Sequence: Synthetic peptide
  XENP022847 vhCDR2
EISTKANNHATYYAESVKG

SEQ ID NO: 35931 - protein, 10 aa, Artificial Sequence
  Description of Artificial Sequence: Synthetic peptide
  XENP022847 vhCDR3
LATWDWYFDV

SEQ ID NO: 35932 - protein, 480 aa, Artificial Sequence; identical to SEQ ID NO: 23581
  Description of Artificial Sequence: Synthetic polypeptide
  XENP022847 7G8_H3.30_L1.34_Fab-1G6_L1.194_H1.279_scFv scFv-Fc Heavy Chain

SEQ ID NO: 35933 - protein, 107 aa, Artificial Sequence; identical to SEQ ID NO: 10999
  Description of Artificial Sequence: Synthetic polypeptide
  VH of XENP022847

SEQ ID NO: 35934 - protein, 122 aa, Artificial Sequence; identical to SEQ ID NO: 10908
  Description of Artificial Sequence: Synthetic polypeptide
  VL of XENP022847

SEQ ID NO: 35935 - protein, 231 aa, Artificial Sequence; identical to SEQ ID NO: 21572
  Description of Artificial Sequence: Synthetic polypeptide
  Fc chain of XENP022847

SEQ ID NO: 35936 - protein, 11 aa, Artificial Sequence
  Description of Artificial Sequence: Synthetic peptide
  XENP022847 vhCDR1
RASQSVGNDVA

SEQ ID NO: 35937 - protein, 7 aa, Artificial Sequence
  Description of Artificial Sequence: Synthetic peptide
  XENP022847 vhCDR2
YASHRYT

SEQ ID NO: 35938 - protein, 9 aa, Artificial Sequence
  Description of Artificial Sequence: Synthetic peptide
  XENP022847 vhCDR3
QQDFSSPRT

SEQ ID NO: 35939 - protein, 5 aa, Artificial Sequence
  Description of Artificial Sequence: Synthetic peptide
  XENP022847 vlCDR1
NYWMN

SEQ ID NO: 35940 - protein, 19 aa, Artificial Sequence
  Description of Artificial Sequence: Synthetic peptide
  XENP022847 vlCDR2
EIRLYSNNYATHYAESVKG

SEQ ID NO: 35941 - protein, 11 aa, Artificial Sequence
  Description of Artificial Sequence: Synthetic peptide
  XENP022847 vlCDR3
YYGNYGGYFDV

SEQ ID NO: 35942 - protein, 218 aa, Artificial Sequence; identical to SEQ ID NO: 22599
  Description of Artificial Sequence: Synthetic polypeptide
  XENP022847 7G8_H3.30_L1.34_Fab-1G6_L1.194_H1.279_scFv Light Chain

SEQ ID NO: 35943 - protein, 111 aa, Artificial Sequence; identical to SEQ ID NO: 22600
  Description of Artificial Sequence: Synthetic polypeptide
  VL of XENP022847

SEQ ID NO: 35944 - protein, 15 aa, Artificial Sequence
  Description of Artificial Sequence: Synthetic peptide
  XENP022847 vlCDR1
RASQSVDYDGDSYMN

SEQ ID NO: 35945 - protein, 7 aa, Artificial Sequence
  Description of Artificial Sequence: Synthetic peptide
  XENP022847 vlCDR2
AASELES

SEQ ID NO: 35946 - protein, 9 aa, Artificial Sequence
  Description of Artificial Sequence: Synthetic peptide
  XENP022847 vlCDR3
QQSNEDPFT

SEQ ID NO: 35947 - protein, 450 aa, Artificial Sequence; identical to SEQ ID NO: 35607
  Description of Artificial Sequence: Synthetic polypeptide
  XENP022848 7G8_H3.30_L1.36_Fab-1G6_L1.194_H1.279_scFv Fab-Fc Heavy Chain

SEQ ID NO: 35948 - protein, 121 aa, Artificial Sequence; identical to SEQ ID NO: 22485
  Description of Artificial Sequence: Synthetic polypeptide
  VH of XENP022848

SEQ ID NO: 35949 - protein, 5 aa, Artificial Sequence
  Description of Artificial Sequence: Synthetic peptide
  XENP022848 vhCDR1
DAWMS

SEQ ID NO: 35950 - protein, 19 aa, Artificial Sequence
  Description of Artificial Sequence: Synthetic peptide
  XENP022848 vhCDR2
EISTKANNHATYYAESVKG

SEQ ID NO: 35951 - protein, 10 aa, Artificial Sequence
  Description of Artificial Sequence: Synthetic peptide
  XENP022848 vhCDR3
LATWDWYFDV

SEQ ID NO: 35952 - protein, 480 aa, Artificial Sequence; identical to SEQ ID NO: 23581
  Description of Artificial Sequence: Synthetic polypeptide
  XENP022848 7G8_H3.30_L1.36_Fab-1G6_L1.194_H1.279_scFv scFv-Fc Heavy Chain

SEQ ID NO: 35953 - protein, 107 aa, Artificial Sequence; identical to SEQ ID NO: 10999
  Description of Artificial Sequence: Synthetic polypeptide
  VH of XENP022848

SEQ ID NO: 35954 - protein, 122 aa, Artificial Sequence; identical to SEQ ID NO: 10908
  Description of Artificial Sequence: Synthetic polypeptide
  VL of XENP022848

SEQ ID NO: 35955 - protein, 231 aa, Artificial Sequence; identical to SEQ ID NO: 21572
  Description of Artificial Sequence: Synthetic polypeptide
  Fc chain of XENP022848

SEQ ID NO: 35956 - protein, 11 aa, Artificial Sequence
  Description of Artificial Sequence: Synthetic peptide
  XENP022848 vhCDR1
RASQSVGNDVA

SEQ ID NO: 35957 - protein, 7 aa, Artificial Sequence
  Description of Artificial Sequence: Synthetic peptide
  XENP022848 vhCDR2
YASHRYT

SEQ ID NO: 35958 - protein, 9 aa, Artificial Sequence
  Description of Artificial Sequence: Synthetic peptide
  XENP022848 vhCDR3
QQDFSSPRT

SEQ ID NO: 35959 - protein, 5 aa, Artificial Sequence
  Description of Artificial Sequence: Synthetic peptide
  XENP022848 vlCDR1
NYWMN

SEQ ID NO: 35960 - protein, 19 aa, Artificial Sequence
  Description of Artificial Sequence: Synthetic peptide
  XENP022848 vlCDR2
EIRLYSNNYATHYAESVKG

SEQ ID NO: 35961 - protein, 11 aa, Artificial Sequence
  Description of Artificial Sequence: Synthetic peptide
  XENP022848 vlCDR3
YYGNYGGYFDV

SEQ ID NO: 35962 - protein, 218 aa, Artificial Sequence; identical to SEQ ID NO: 22619
  Description of Artificial Sequence: Synthetic polypeptide
  XENP022848 7G8_H3.30_L1.36_Fab-1G6_L1.194_H1.279_scFv Light Chain

SEQ ID NO: 35963 - protein, 111 aa, Artificial Sequence; identical to SEQ ID NO: 22620
  Description of Artificial Sequence: Synthetic polypeptide
  VL of XENP022848

SEQ ID NO: 35964 - protein, 15 aa, Artificial Sequence
  Description of Artificial Sequence: Synthetic peptide
  XENP022848 vlCDR1
RASQSVDHDGDSYMN

SEQ ID NO: 35965 - protein, 7 aa, Artificial Sequence
  Description of Artificial Sequence: Synthetic peptide
  XENP022848 vlCDR2
AASELES

SEQ ID NO: 35966 - protein, 9 aa, Artificial Sequence
  Description of Artificial Sequence: Synthetic peptide
  XENP022848 vlCDR3
QQSNEDPFT

SEQ ID NO: 35967 - protein, 447 aa, Artificial Sequence; identical to SEQ ID NO: 35647
  Description of Artificial Sequence: Synthetic polypeptide
  XENP022849 2A11_H1.144_L2.142_Fab-1G6_L1.194_H1.279_scFv Fab-Fc Heavy Chain

SEQ ID NO: 35968 - protein, 118 aa, Artificial Sequence; identical to SEQ ID NO: 22085
  Description of Artificial Sequence: Synthetic polypeptide
  VH of XENP022849

SEQ ID NO: 35969 - protein, 5 aa, Artificial Sequence
  Description of Artificial Sequence: Synthetic peptide
  XENP022849 vhCDR1
DYFMH

SEQ ID NO: 35970 - protein, 17 aa, Artificial Sequence
  Description of Artificial Sequence: Synthetic peptide
  XENP022849 vhCDR2
WIDPELGDTEYAPKFQG

SEQ ID NO: 35971 - protein, 9 aa, Artificial Sequence
  Description of Artificial Sequence: Synthetic peptide
  XENP022849 vhCDR3
RGVYQALDY

SEQ ID NO: 35972 - protein, 480 aa, Artificial Sequence; identical to SEQ ID NO: 23581
  Description of Artificial Sequence: Synthetic polypeptide
  XENP022849 2A11_H1.144_L2.142_Fab-1G6_L1.194_H1.279_scFv scFv-Fc Heavy Chain

SEQ ID NO: 35973 - protein, 107 aa, Artificial Sequence; identical to SEQ ID NO: 10999
  Description of Artificial Sequence: Synthetic polypeptide
  VH of XENP022849

SEQ ID NO: 35974 - protein, 122 aa, Artificial Sequence; identical to SEQ ID NO: 10908
  Description of Artificial Sequence: Synthetic polypeptide
  VL of XENP022849

SEQ ID NO: 35975 - protein, 231 aa, Artificial Sequence; identical to SEQ ID NO: 21572
  Description of Artificial Sequence: Synthetic polypeptide
  Fc chain of XENP022849

SEQ ID NO: 35976 - protein, 11 aa, Artificial Sequence
  Description of Artificial Sequence: Synthetic peptide
  XENP022849 vhCDR1
RASQSVGNDVA

SEQ ID NO: 35977 - protein, 7 aa, Artificial Sequence
  Description of Artificial Sequence: Synthetic peptide
  XENP022849 vhCDR2
YASHRYT

SEQ ID NO: 35978 - protein, 9 aa, Artificial Sequence
  Description of Artificial Sequence: Synthetic peptide
  XENP022849 vhCDR3
QQDFSSPRT

SEQ ID NO: 35979 - protein, 5 aa, Artificial Sequence
  Description of Artificial Sequence: Synthetic peptide
  XENP022849 vlCDR1
NYWMN

SEQ ID NO: 35980 - protein, 19 aa, Artificial Sequence
  Description of Artificial Sequence: Synthetic peptide
  XENP022849 vlCDR2
EIRLYSNNYATHYAESVKG

SEQ ID NO: 35981 - protein, 11 aa, Artificial Sequence
  Description of Artificial Sequence: Synthetic peptide
  XENP022849 vlCDR3
YYGNYGGYFDV

SEQ ID NO: 35982 - protein, 214 aa, Artificial Sequence; identical to SEQ ID NO: 22279
  Description of Artificial Sequence: Synthetic polypeptide
  XENP022849 2A11_H1.144_L2.142_Fab-1G6_L1.194_H1.279_scFv Light Chain

SEQ ID NO: 35983 - protein, 107 aa, Artificial Sequence; identical to SEQ ID NO: 22280
  Description of Artificial Sequence: Synthetic polypeptide
  VL of XENP022849

SEQ ID NO: 35984 - protein, 11 aa, Artificial Sequence
  Description of Artificial Sequence: Synthetic peptide
  XENP022849 vlCDR1
QASQDIGNYLN

SEQ ID NO: 35985 - protein, 7 aa, Artificial Sequence
  Description of Artificial Sequence: Synthetic peptide
  XENP022849 vlCDR2
FTSYLHS

SEQ ID NO: 35986 - protein, 9 aa, Artificial Sequence
  Description of Artificial Sequence: Synthetic peptide
  XENP022849 vlCDR3
QQGNTLPYT

SEQ ID NO: 35987 - protein, 447 aa, Artificial Sequence; identical to SEQ ID NO: 35647
  Description of Artificial Sequence: Synthetic polypeptide
  XENP022850 2A11_H1.144_L2.113_Fab-1G6_L1.194_H1.279_scFv Fab -Fc Heavy Chain

SEQ ID NO: 35988 - protein, 118 aa, Artificial Sequence; identical to SEQ ID NO: 22085
  Description of Artificial Sequence: Synthetic polypeptide
  VH of XENP022850

SEQ ID NO: 35989 - protein, 5 aa, Artificial Sequence
  Description of Artificial Sequence: Synthetic peptide
  XENP022850 vhCDR1
DYFMH

SEQ ID NO: 35990 - protein, 17 aa, Artificial Sequence
  Description of Artificial Sequence: Synthetic peptide
  XENP022850 vhCDR2
WIDPELGDTEYAPKFQG

SEQ ID NO: 35991 - protein, 9 aa, Artificial Sequence
  Description of Artificial Sequence: Synthetic peptide
  XENP022850 vhCDR3
RGVYQALDY

SEQ ID NO: 35992 - protein, 480 aa, Artificial Sequence; identical to SEQ ID NO: 23581
  Description of Artificial Sequence: Synthetic polypeptide
  XENP022850 2A11_H1.144_L2.113_Fab-1G6_L1.194_H1.279_scFv scFv -Fc Heavy Chain

SEQ ID NO: 35993 - protein, 107 aa, Artificial Sequence; identical to SEQ ID NO: 10999
  Description of Artificial Sequence: Synthetic polypeptide
  VH of XENP022850

SEQ ID NO: 35994 - protein, 122 aa, Artificial Sequence; identical to SEQ ID NO: 10908
  Description of Artificial Sequence: Synthetic polypeptide
  VL of XENP022850

SEQ ID NO: 35995 - protein, 231 aa, Artificial Sequence; identical to SEQ ID NO: 21572
  Description of Artificial Sequence: Synthetic polypeptide
  Fc chain of XENP022850

SEQ ID NO: 35996 - protein, 11 aa, Artificial Sequence
  Description of Artificial Sequence: Synthetic peptide
  XENP022850 vhCDR1
RASQSVGNDVA

SEQ ID NO: 35997 - protein, 7 aa, Artificial Sequence
  Description of Artificial Sequence: Synthetic peptide
  XENP022850 vhCDR2
YASHRYT

SEQ ID NO: 35998 - protein, 9 aa, Artificial Sequence
  Description of Artificial Sequence: Synthetic peptide
  XENP022850 vhCDR3
QQDFSSPRT

SEQ ID NO: 35999 - protein, 5 aa, Artificial Sequence
  Description of Artificial Sequence: Synthetic peptide
  XENP022850 vlCDR1
NYWMN

SEQ ID NO: 36000 - protein, 19 aa, Artificial Sequence
  Description of Artificial Sequence: Synthetic peptide
  XENP022850 vlCDR2
EIRLYSNNYATHYAESVKG

SEQ ID NO: 36001 - protein, 11 aa, Artificial Sequence
  Description of Artificial Sequence: Synthetic peptide
  XENP022850 vlCDR3
YYGNYGGYFDV

SEQ ID NO: 36002 - protein, 214 aa, Artificial Sequence; identical to SEQ ID NO: 22079
  Description of Artificial Sequence: Synthetic polypeptide
  XENP022850 2A11_H1.144_L2.113_Fab-1G6_L1.194_H1.279_scFv Light Chain

SEQ ID NO: 36003 - protein, 107 aa, Artificial Sequence; identical to SEQ ID NO: 22080
  Description of Artificial Sequence: Synthetic polypeptide
  VL of XENP022850

SEQ ID NO: 36004 - protein, 11 aa, Artificial Sequence
  Description of Artificial Sequence: Synthetic peptide
  XENP022850 vlCDR1
QASQDIGNYLN

SEQ ID NO: 36005 - protein, 7 aa, Artificial Sequence
  Description of Artificial Sequence: Synthetic peptide
  XENP022850 vlCDR2
FTSYLHS

SEQ ID NO: 36006 - protein, 9 aa, Artificial Sequence
  Description of Artificial Sequence: Synthetic peptide
  XENP022850 vlCDR3
QQGNTLPYT

SEQ ID NO: 36007 - protein, 447 aa, Artificial Sequence; identical to SEQ ID NO: 35707
  Description of Artificial Sequence: Synthetic polypeptide
  XENP022851 2A11_H1.125_L2.126_Fab-1G6_L1.194_H1.279_scFv Fab-Fc Heavy Chain

SEQ ID NO: 36008 - protein, 118 aa, Artificial Sequence; identical to SEQ ID NO: 22065
  Description of Artificial Sequence: Synthetic polypeptide
  VH of XENP022851

SEQ ID NO: 36009 - protein, 5 aa, Artificial Sequence
  Description of Artificial Sequence: Synthetic peptide
  XENP022851 vhCDR1
HYFMH

SEQ ID NO: 36010 - protein, 17 aa, Artificial Sequence
  Description of Artificial Sequence: Synthetic peptide
  XENP022851 vhCDR2
WIDPYLGDTEYAPKFQG

SEQ ID NO: 36011 - protein, 9 aa, Artificial Sequence
  Description of Artificial Sequence: Synthetic peptide
  XENP022851 vhCDR3
RGVYQALDY

SEQ ID NO: 36012 - protein, 480 aa, Artificial Sequence; identical to SEQ ID NO: 23581
  Description of Artificial Sequence: Synthetic polypeptide
  XENP022851 2A11_H1.125_L2.126_Fab-1G6_L1.194_H1.279_scFv scFv-Fc Heavy Chain

SEQ ID NO: 36013 - protein, 107 aa, Artificial Sequence; identical to SEQ ID NO: 10999
  Description of Artificial Sequence: Synthetic polypeptide
  VH of XENP022851

SEQ ID NO: 36014 - protein, 122 aa, Artificial Sequence; identical to SEQ ID NO: 10908
  Description of Artificial Sequence: Synthetic polypeptide
  VL of XENP022851

SEQ ID NO: 36015 - protein, 231 aa, Artificial Sequence; identical to SEQ ID NO: 21572
  Description of Artificial Sequence: Synthetic polypeptide
  Fc chain of XENP022851

SEQ ID NO: 36016 - protein, 11 aa, Artificial Sequence
  Description of Artificial Sequence: Synthetic peptide
  XENP022851 vhCDR1
RASQSVGNDVA

SEQ ID NO: 36017 - protein, 7 aa, Artificial Sequence
  Description of Artificial Sequence: Synthetic peptide
  XENP022851 vhCDR2
YASHRYT

SEQ ID NO: 36018 - protein, 9 aa, Artificial Sequence
  Description of Artificial Sequence: Synthetic peptide
  XENP022851 vhCDR3
QQDFSSPRT

SEQ ID NO: 36019 - protein, 5 aa, Artificial Sequence
  Description of Artificial Sequence: Synthetic peptide
  XENP022851 vlCDR1
NYWMN

SEQ ID NO: 36020 - protein, 19 aa, Artificial Sequence
  Description of Artificial Sequence: Synthetic peptide
  XENP022851 vlCDR2
EIRLYSNNYATHYAESVKG

SEQ ID NO: 36021 - protein, 11 aa, Artificial Sequence
  Description of Artificial Sequence: Synthetic peptide
  XENP022851 vlCDR3
YYGNYGGYFDV

SEQ ID NO: 36022 - protein, 214 aa, Artificial Sequence; identical to SEQ ID NO: 22259
  Description of Artificial Sequence: Synthetic polypeptide
  XENP022851 2A11_H1.125_L2.126_Fab-1G6_L1.194_H1.279_scFv Light Chain

SEQ ID NO: 36023 - protein, 107 aa, Artificial Sequence; identical to SEQ ID NO: 22260
  Description of Artificial Sequence: Synthetic polypeptide
  VL of XENP022851

SEQ ID NO: 36024 - protein, 11 aa, Artificial Sequence
  Description of Artificial Sequence: Synthetic peptide
  XENP022851 vlCDR1
QASQDIGNYLN

SEQ ID NO: 36025 - protein, 7 aa, Artificial Sequence
  Description of Artificial Sequence: Synthetic peptide
  XENP022851 vlCDR2
FTSYLHS

SEQ ID NO: 36026 - protein, 9 aa, Artificial Sequence
  Description of Artificial Sequence: Synthetic peptide
  XENP022851 vlCDR3
QEGNTLPYT

SEQ ID NO: 36027 - protein, 447 aa, Artificial Sequence; identical to SEQ ID NO: 21564
  Description of Artificial Sequence: Synthetic polypeptide
  XENP022852 2A11_H1_L2.113_Fab-1G6_L1.194_H1.279_scFv Fab-Fc Heavy Chain

SEQ ID NO: 36028 - protein, 118 aa, Artificial Sequence; identical to SEQ ID NO: 17236
  Description of Artificial Sequence: Synthetic polypeptide
  VH of XENP022852

SEQ ID NO: 36029 - protein, 5 aa, Artificial Sequence
  Description of Artificial Sequence: Synthetic peptide
  XENP022852 vhCDR1
DYYMH

SEQ ID NO: 36030 - protein, 17 aa, Artificial Sequence
  Description of Artificial Sequence: Synthetic peptide
  XENP022852 vhCDR2
WIDPENGDTEYAPKFQG

SEQ ID NO: 36031 - protein, 9 aa, Artificial Sequence
  Description of Artificial Sequence: Synthetic peptide
  XENP022852 vhCDR3
RGVRQALDY

SEQ ID NO: 36032 - protein, 480 aa, Artificial Sequence; identical to SEQ ID NO: 23581
  Description of Artificial Sequence: Synthetic polypeptide
  XENP022852 2A11_H1_L2.113_Fab-1G6_L1.194_H1.279_scFv scFv-Fc Heavy Chain

SEQ ID NO: 36033 - protein, 107 aa, Artificial Sequence; identical to SEQ ID NO: 10999
  Description of Artificial Sequence: Synthetic polypeptide
  VH of XENP022852

SEQ ID NO: 36034 - protein, 122 aa, Artificial Sequence; identical to SEQ ID NO: 10908
  Description of Artificial Sequence: Synthetic polypeptide
  VL of XENP022852

SEQ ID NO: 36035 - protein, 231 aa, Artificial Sequence; identical to SEQ ID NO: 21572
  Description of Artificial Sequence: Synthetic polypeptide
  Fc chain of XENP022852

SEQ ID NO: 36036 - protein, 11 aa, Artificial Sequence
  Description of Artificial Sequence: Synthetic peptide
  XENP022852 vhCDR1
RASQSVGNDVA

SEQ ID NO: 36037 - protein, 7 aa, Artificial Sequence
  Description of Artificial Sequence: Synthetic peptide
  XENP022852 vhCDR2
YASHRYT

SEQ ID NO: 36038 - protein, 9 aa, Artificial Sequence
  Description of Artificial Sequence: Synthetic peptide
  XENP022852 vhCDR3
QQDFSSPRT

SEQ ID NO: 36039 - protein, 5 aa, Artificial Sequence
  Description of Artificial Sequence: Synthetic peptide
  XENP022852 vlCDR1
NYWMN

SEQ ID NO: 36040 - protein, 19 aa, Artificial Sequence
  Description of Artificial Sequence: Synthetic peptide
  XENP022852 vlCDR2
EIRLYSNNYATHYAESVKG

SEQ ID NO: 36041 - protein, 11 aa, Artificial Sequence
  Description of Artificial Sequence: Synthetic peptide
  XENP022852 vlCDR3
YYGNYGGYFDV

SEQ ID NO: 36042 - protein, 214 aa, Artificial Sequence; identical to SEQ ID NO: 22079
  Description of Artificial Sequence: Synthetic polypeptide
  XENP022852 2A11_H1_L2.113_Fab-1G6_L1.194_H1.279_scFv Light Chain

SEQ ID NO: 36043 - protein, 107 aa, Artificial Sequence; identical to SEQ ID NO: 22080
  Description of Artificial Sequence: Synthetic polypeptide
  VL of XENP022852

SEQ ID NO: 36044 - protein, 11 aa, Artificial Sequence
  Description of Artificial Sequence: Synthetic peptide
  XENP022852 vlCDR1
QASQDIGNYLN

SEQ ID NO: 36045 - protein, 7 aa, Artificial Sequence
  Description of Artificial Sequence: Synthetic peptide
  XENP022852 vlCDR2
FTSYLHS

SEQ ID NO: 36046 - protein, 9 aa, Artificial Sequence
  Description of Artificial Sequence: Synthetic peptide
  XENP022852 vlCDR3
QQGNTLPYT

SEQ ID NO: 36047 - protein, 447 aa, Artificial Sequence; identical to SEQ ID NO: 17235
  Description of Artificial Sequence: Synthetic polypeptide
  XENP023349 2A11_H1L2_Fab-1C11_H3L3_scFv Fab-Fc Heavy Chain

SEQ ID NO: 36048 - protein, 118 aa, Artificial Sequence; identical to SEQ ID NO: 17236
  Description of Artificial Sequence: Synthetic polypeptide
  VH of XENP023349

SEQ ID NO: 36049 - protein, 5 aa, Artificial Sequence
  Description of Artificial Sequence: Synthetic peptide
  XENP023349 vhCDR1
DYYMH

SEQ ID NO: 36050 - protein, 17 aa, Artificial Sequence
  Description of Artificial Sequence: Synthetic peptide
  XENP023349 vhCDR2
WIDPENGDTEYAPKFQG

SEQ ID NO: 36051 - protein, 9 aa, Artificial Sequence
  Description of Artificial Sequence: Synthetic peptide
  XENP023349 vhCDR3
RGVRQALDY

SEQ ID NO: 36052 - protein, 480 aa, Artificial Sequence
  Description of Artificial Sequence: Synthetic polypeptide
  XENP023349 2A11_H1L2_Fab-1C11_H3L3_scFv scFv-Fc Heavy Chain
QIQLVQSGSELKKPGASVKVSCKASGYTFTHYGMNWVRQAPGQGLEWMGWINTYTGEPTYADGFTGRFVFSLDTSVSTAYLQISSLKAEDTAVYFCARDYYGSSPYWGQGTLVTVSSGKPGSGKPGSGKPGSGKPGSDVLMTQSPDSLAVSLGERATINCKSSQSIVHSNGNTYLEWYQQKPGQSPKLLIYKVSNRFSGVPDRFSGSGSGTDFTLTISSLQAEDVAVYYCFQGSHVPNTFGGGTKVEIKEPKSSDKTHTCPPCPAPPVAGPSVFLFPPKPKDTLMISRTPEVTCVVVDVKHEDPEVKFNWYVDGVEVHNAKTKPREEQYNSTYRVVSVLTVLHQDWLNGKEYKCKVSNKALPAPIEKTISKAKGQPREPQVYTLPPSREQMTKNQVKLTCLVKGFYPSDIAVEWESNGQPENNYKTTPPVLDSDGSFFLYSKLTVDKSRWQQGNVFSCSVMHEALHNHYTQKSLSLSPGK

SEQ ID NO: 36053 - protein, 117 aa, Artificial Sequence; identical to SEQ ID NO: 33034
  Description of Artificial Sequence: Synthetic polypeptide
  VH of XENP023349

SEQ ID NO: 36054 - protein, 112 aa, Artificial Sequence; identical to SEQ ID NO: 33009
  Description of Artificial Sequence: Synthetic polypeptide
  VL of XENP023349

SEQ ID NO: 36055 - protein, 231 aa, Artificial Sequence; identical to SEQ ID NO: 21532
  Description of Artificial Sequence: Synthetic polypeptide
  Fc chain of XENP023349

SEQ ID NO: 36056 - protein, 5 aa, Artificial Sequence
  Description of Artificial Sequence: Synthetic peptide
  XENP023349 vhCDR1
HYGMN

SEQ ID NO: 36057 - protein, 17 aa, Artificial Sequence
  Description of Artificial Sequence: Synthetic peptide
  XENP023349 vhCDR2
WINTYTGEPTYADGFTG

SEQ ID NO: 36058 - protein, 8 aa, Artificial Sequence
  Description of Artificial Sequence: Synthetic peptide
  XENP023349 vhCDR3
DYYGSSPY

SEQ ID NO: 36059 - protein, 16 aa, Artificial Sequence
  Description of Artificial Sequence: Synthetic peptide
  XENP023349 vlCDR1
KSSQSIVHSNGNTYLE

SEQ ID NO: 36060 - protein, 7 aa, Artificial Sequence
  Description of Artificial Sequence: Synthetic peptide
  XENP023349 vlCDR2
KVSNRFS

SEQ ID NO: 36061 - protein, 9 aa, Artificial Sequence
  Description of Artificial Sequence: Synthetic peptide
  XENP023349 vlCDR3
FQGSHVPNT

SEQ ID NO: 36062 - protein, 214 aa, Artificial Sequence; identical to SEQ ID NO: 17250
  Description of Artificial Sequence: Synthetic polypeptide
  XENP023349 2A11_H1L2_Fab-1C11_H3L3_scFv Light Chain

SEQ ID NO: 36063 - protein, 107 aa, Artificial Sequence; identical to SEQ ID NO: 17251
  Description of Artificial Sequence: Synthetic polypeptide
  VL of XENP023349

SEQ ID NO: 36064 - protein, 11 aa, Artificial Sequence
  Description of Artificial Sequence: Synthetic peptide
  XENP023349 vlCDR1
QASQDIGNYLN

SEQ ID NO: 36065 - protein, 7 aa, Artificial Sequence
  Description of Artificial Sequence: Synthetic peptide
  XENP023349 vlCDR2
YTSRLHS

SEQ ID NO: 36066 - protein, 9 aa, Artificial Sequence
  Description of Artificial Sequence: Synthetic peptide
  XENP023349 vlCDR3
QQGNTLPYT

SEQ ID NO: 36067 - protein, 447 aa, Artificial Sequence; identical to SEQ ID NO: 22084
  Description of Artificial Sequence: Synthetic polypeptide
  XENP023350 2A11_H1.144_L2.142_Fab-1C11_H3L3_scFv Fab-Fc Heavy Chain

SEQ ID NO: 36068 - protein, 118 aa, Artificial Sequence; identical to SEQ ID NO: 22085
  Description of Artificial Sequence: Synthetic polypeptide
  VH of XENP023350

SEQ ID NO: 36069 - protein, 5 aa, Artificial Sequence
  Description of Artificial Sequence: Synthetic peptide
  XENP023350 vhCDR1
DYFMH

SEQ ID NO: 36070 - protein, 17 aa, Artificial Sequence
  Description of Artificial Sequence: Synthetic peptide
  XENP023350 vhCDR2
WIDPELGDTEYAPKFQG

SEQ ID NO: 36071 - protein, 9 aa, Artificial Sequence
  Description of Artificial Sequence: Synthetic peptide
  XENP023350 vhCDR3
RGVYQALDY

SEQ ID NO: 36072 - protein, 480 aa, Artificial Sequence; identical to SEQ ID NO: 36052
  Description of Artificial Sequence: Synthetic polypeptide
  XENP023350 2A11_H1.144_L2.142_Fab-1C11_H3L3_scFv scFv-Fc Heavy Chain

SEQ ID NO: 36073 - protein, 117 aa, Artificial Sequence; identical to SEQ ID NO: 33034
  Description of Artificial Sequence: Synthetic polypeptide
  VH of XENP023350

SEQ ID NO: 36074 - protein, 112 aa, Artificial Sequence; identical to SEQ ID NO: 33009
  Description of Artificial Sequence: Synthetic polypeptide
  VL of XENP023350

SEQ ID NO: 36075 - protein, 231 aa, Artificial Sequence; identical to SEQ ID NO: 21532
  Description of Artificial Sequence: Synthetic polypeptide
  Fc chain of XENP023350

SEQ ID NO: 36076 - protein, 5 aa, Artificial Sequence
  Description of Artificial Sequence: Synthetic peptide
  XENP023350 vhCDR1
HYGMN

SEQ ID NO: 36077 - protein, 17 aa, Artificial Sequence
  Description of Artificial Sequence: Synthetic peptide
  XENP023350 vhCDR2
WINTYTGEPTYADGFTG

SEQ ID NO: 36078 - protein, 8 aa, Artificial Sequence
  Description of Artificial Sequence: Synthetic peptide
  XENP023350 vhCDR3
DYYGSSPY

SEQ ID NO: 36079 - protein, 16 aa, Artificial Sequence
  Description of Artificial Sequence: Synthetic peptide
  XENP023350 vlCDR1
KSSQSIVHSNGNTYLE

SEQ ID NO: 36080 - protein, 7 aa, Artificial Sequence
  Description of Artificial Sequence: Synthetic peptide
  XENP023350 vlCDR2
KVSNRFS

SEQ ID NO: 36081 - protein, 9 aa, Artificial Sequence
  Description of Artificial Sequence: Synthetic peptide
  XENP023350 vlCDR3
FQGSHVPNT

SEQ ID NO: 36082 - protein, 214 aa, Artificial Sequence; identical to SEQ ID NO: 22279
  Description of Artificial Sequence: Synthetic polypeptide
  XENP023350 2A11_H1.144_L2.142_Fab-1C11_H3L3_scFv Light Chain

SEQ ID NO: 36083 - protein, 107 aa, Artificial Sequence; identical to SEQ ID NO: 22280
  Description of Artificial Sequence: Synthetic polypeptide
  VL of XENP023350

SEQ ID NO: 36084 - protein, 11 aa, Artificial Sequence
  Description of Artificial Sequence: Synthetic peptide
  XENP023350 vlCDR1
QASQDIGNYLN

SEQ ID NO: 36085 - protein, 7 aa, Artificial Sequence
  Description of Artificial Sequence: Synthetic peptide
  XENP023350 vlCDR2
FTSYLHS

SEQ ID NO: 36086 - protein, 9 aa, Artificial Sequence
  Description of Artificial Sequence: Synthetic peptide
  XENP023350 vlCDR3
QQGNTLPYT

SEQ ID NO: 36087 - protein, 447 aa, Artificial Sequence; identical to SEQ ID NO: 17235
  Description of Artificial Sequence: Synthetic polypeptide
  XENP023351 2A11_H1L2_Fab-2E9_H1L1_scFv Fab-Fc Heavy Chain

SEQ ID NO: 36088 - protein, 118 aa, Artificial Sequence; identical to SEQ ID NO: 17236
  Description of Artificial Sequence: Synthetic polypeptide
  VH of XENP023351

SEQ ID NO: 36089 - protein, 5 aa, Artificial Sequence
  Description of Artificial Sequence: Synthetic peptide
  XENP023351 vhCDR1
DYYMH

SEQ ID NO: 36090 - protein, 17 aa, Artificial Sequence
  Description of Artificial Sequence: Synthetic peptide
  XENP023351 vhCDR2
WIDPENGDTEYAPKFQG

SEQ ID NO: 36091 - protein, 9 aa, Artificial Sequence
  Description of Artificial Sequence: Synthetic peptide
  XENP023351 vhCDR3
RGVRQALDY

SEQ ID NO: 36092 - protein, 478 aa, Artificial Sequence
  Description of Artificial Sequence: Synthetic polypeptide
  XENP023351 2A11_H1L2_Fab-2E9_H1L1_scFv scFv-Fc Heavy Chain
QVQLVQSGAEVKKPGASVKVSCKASGYAFTNYWLGWVRQAPGQGLEWMGNFYPGSSNTYYNEKFQGRVTMTADKSISTAYMELSRLRSDDTAVYFCARHYGTNYRYFDVWGAGTLVTVSSGKPGSGKPGSGKPGSGKPGSDIVLTQSPGTLSLSPGERATLSCRASQSVSNDVAWYQQKPGQSPRLLIYYASNRYTGVPDRFTGSGYGTDFTLTISRLEPEDFAVYFCQQDYSSPYTFGGGTKVEIKEPKSSDKTHTCPPCPAPPVAGPSVFLFPPKPKDTLMISRTPEVTCVVVDVKHEDPEVKFNWYVDGVEVHNAKTKPREEQYNSTYRVVSVLTVLHQDWLNGKEYKCKVSNKALPAPIEKTISKAKGQPREPQVYTLPPSREQMTKNQVKLTCLVKGFYPSDIAVEWESNGQPENNYKTTPPVLDSDGSFFLYSKLTVDKSRWQQGNVFSCSVMHEALHNHYTQKSLSLSPGK

SEQ ID NO: 36093 - protein, 120 aa, Artificial Sequence; identical to SEQ ID NO: 11412
  Description of Artificial Sequence: Synthetic polypeptide
  VH of XENP023351

SEQ ID NO: 36094 - protein, 107 aa, Artificial Sequence; identical to SEQ ID NO: 11413
  Description of Artificial Sequence: Synthetic polypeptide
  VL of XENP023351

SEQ ID NO: 36095 - protein, 231 aa, Artificial Sequence; identical to SEQ ID NO: 21532
  Description of Artificial Sequence: Synthetic polypeptide
  Fc chain of XENP023351

SEQ ID NO: 36096 - protein, 5 aa, Artificial Sequence
  Description of Artificial Sequence: Synthetic peptide
  XENP023351 vhCDR1
NYWLG

SEQ ID NO: 36097 - protein, 17 aa, Artificial Sequence
  Description of Artificial Sequence: Synthetic peptide
  XENP023351 vhCDR2
NFYPGSSNTYYNEKFQG

SEQ ID NO: 36098 - protein, 11 aa, Artificial Sequence
  Description of Artificial Sequence: Synthetic peptide
  XENP023351 vhCDR3
HYGTNYRYFDV

SEQ ID NO: 36099 - protein, 11 aa, Artificial Sequence
  Description of Artificial Sequence: Synthetic peptide
  XENP023351 vlCDR1
RASQSVSNDVA

SEQ ID NO: 36100 - protein, 7 aa, Artificial Sequence
  Description of Artificial Sequence: Synthetic peptide
  XENP023351 vlCDR2
YASNRYT

SEQ ID NO: 36101 - protein, 9 aa, Artificial Sequence
  Description of Artificial Sequence: Synthetic peptide
  XENP023351 vlCDR3
QQDYSSPYT

SEQ ID NO: 36102 - protein, 214 aa, Artificial Sequence; identical to SEQ ID NO: 17250
  Description of Artificial Sequence: Synthetic polypeptide
  XENP023351 2A11_H1L2_Fab-2E9_H1L1_scFv Light Chain

SEQ ID NO: 36103 - protein, 107 aa, Artificial Sequence; identical to SEQ ID NO: 17251
  Description of Artificial Sequence: Synthetic polypeptide
  VL of XENP023351

SEQ ID NO: 36104 - protein, 11 aa, Artificial Sequence
  Description of Artificial Sequence: Synthetic peptide
  XENP023351 vlCDR1
QASQDIGNYLN

SEQ ID NO: 36105 - protein, 7 aa, Artificial Sequence
  Description of Artificial Sequence: Synthetic peptide
  XENP023351 vlCDR2
YTSRLHS

SEQ ID NO: 36106 - protein, 9 aa, Artificial Sequence
  Description of Artificial Sequence: Synthetic peptide
  XENP023351 vlCDR3
QQGNTLPYT

SEQ ID NO: 36107 - protein, 447 aa, Artificial Sequence; identical to SEQ ID NO: 22084
  Description of Artificial Sequence: Synthetic polypeptide
  XENP023352 2A11_H1.144_L2.142_Fab-2E9_H1L1_scFv Fab-Fc Heavy Chain

SEQ ID NO: 36108 - protein, 118 aa, Artificial Sequence; identical to SEQ ID NO: 22085
  Description of Artificial Sequence: Synthetic polypeptide
  VH of XENP023352

SEQ ID NO: 36109 - protein, 5 aa, Artificial Sequence
  Description of Artificial Sequence: Synthetic peptide
  XENP023352 vhCDR1
DYFMH

SEQ ID NO: 36110 - protein, 17 aa, Artificial Sequence
  Description of Artificial Sequence: Synthetic peptide
  XENP023352 vhCDR2
WIDPELGDTEYAPKFQG

SEQ ID NO: 36111 - protein, 9 aa, Artificial Sequence
  Description of Artificial Sequence: Synthetic peptide
  XENP023352 vhCDR3
RGVYQALDY

SEQ ID NO: 36112 - protein, 458 aa, Artificial Sequence
  Description of Artificial Sequence: Synthetic polypeptide
  XENP023352 2A11_H1.144_L2.142_Fab-2E9_H1L1_scFv scFv-Fc Heavy Chain
QVQLVQSGAEVKKPGASVKVSCKASGYAFTNYWLGWVRQAPGQGLEWMGNFYPGSSNTYYNEKFQGRVTMTADKSISTAYMELSRLRSDDTAVYFCARHYGTNYRYFDVWGAGTLVTVSSDIVLTQSPGTLSLSPGERATLSCRASQSVSNDVAWYQQKPGQSPRLLIYYASNRYTGVPDRFTGSGYGTDFTLTISRLEPEDFAVYFCQQDYSSPYTFGGGTKVEIKEPKSSDKTHTCPPCPAPPVAGPSVFLFPPKPKDTLMISRTPEVTCVVVDVKHEDPEVKFNWYVDGVEVHNAKTKPREEQYNSTYRVVSVLTVLHQDWLNGKEYKCKVSNKALPAPIEKTISKAKGQPREPQVYTLPPSREQMTKNQVKLTCLVKGFYPSDIAVEWESNGQPENNYKTTPPVLDSDGSFFLYSKLTVDKSRWQQGNVFSCSVMHEALHNHYTQKSLSLSPGK

SEQ ID NO: 36113 - protein, 120 aa, Artificial Sequence; identical to SEQ ID NO: 11412
  Description of Artificial Sequence: Synthetic polypeptide
  VH of XENP023352

SEQ ID NO: 36114 - protein, 107 aa, Artificial Sequence; identical to SEQ ID NO: 11413
  Description of Artificial Sequence: Synthetic polypeptide
  VL of XENP023352

SEQ ID NO: 36115 - protein, 231 aa, Artificial Sequence; identical to SEQ ID NO: 21532
  Description of Artificial Sequence: Synthetic polypeptide
  Fc chain of XENP023352

SEQ ID NO: 36116 - protein, 5 aa, Artificial Sequence
  Description of Artificial Sequence: Synthetic peptide
  XENP023352 vhCDR1
NYWLG

SEQ ID NO: 36117 - protein, 17 aa, Artificial Sequence
  Description of Artificial Sequence: Synthetic peptide
  XENP023352 vhCDR2
NFYPGSSNTYYNEKFQG

SEQ ID NO: 36118 - protein, 11 aa, Artificial Sequence
  Description of Artificial Sequence: Synthetic peptide
  XENP023352 vhCDR3
HYGTNYRYFDV

SEQ ID NO: 36119 - protein, 11 aa, Artificial Sequence
  Description of Artificial Sequence: Synthetic peptide
  XENP023352 vlCDR1
RASQSVSNDVA

SEQ ID NO: 36120 - protein, 7 aa, Artificial Sequence
  Description of Artificial Sequence: Synthetic peptide
  XENP023352 vlCDR2
YASNRYT

SEQ ID NO: 36121 - protein, 9 aa, Artificial Sequence
  Description of Artificial Sequence: Synthetic peptide
  XENP023352 vlCDR3
QQDYSSPYT

SEQ ID NO: 36122 - protein, 214 aa, Artificial Sequence; identical to SEQ ID NO: 22279
  Description of Artificial Sequence: Synthetic polypeptide
  XENP023352 2A11_H1.144_L2.142_Fab-2E9_H1L1_scFv Light Chain

SEQ ID NO: 36123 - protein, 107 aa, Artificial Sequence; identical to SEQ ID NO: 22280
  Description of Artificial Sequence: Synthetic polypeptide
  VL of XENP023352

SEQ ID NO: 36124 - protein, 11 aa, Artificial Sequence
  Description of Artificial Sequence: Synthetic peptide
  XENP023352 vlCDR1
QASQDIGNYLN

SEQ ID NO: 36125 - protein, 7 aa, Artificial Sequence
  Description of Artificial Sequence: Synthetic peptide
  XENP023352 vlCDR2
FTSYLHS

SEQ ID NO: 36126 - protein, 9 aa, Artificial Sequence
  Description of Artificial Sequence: Synthetic peptide
  XENP023352 vlCDR3
QQGNTLPYT

SEQ ID NO: 36127 - protein, 446 aa, Artificial Sequence
  Description of Artificial Sequence: Synthetic polypeptide
  XENP022856 1C11_H3L3_IgG1_PVA_/S267K/M428L/N434S Heavy Chain
QIQLVQSGSELKKPGASVKVSCKASGYTFTHYGMNWVRQAPGQGLEWMGWINTYTGEPTYADGFTGRFVFSLDTSVSTAYLQISSLKAEDTAVYFCARDYYGSSPYWGQGTLVTVSSASTKGPSVFPLAPSSKSTSGGTAALGCLVKDYFPEPVTVSWNSGALTSGVHTFPAVLQSSGLYSLSSVVTVPSSSLGTQTYICNVNHKPSNTKVDKKVEPKSCDKTHTCPPCPAPPVAGPSVFLFPPKPKDTLMISRTPEVTCVVVDVKHEDPEVKFNWYVDGVEVHNAKTKPREEQYNSTYRVVSVLTVLHQDWLNGKEYKCKVSNKALPAPIEKTISKAKGQPREPQVYTLPPSREEMTKNQVSLTCLVKGFYPSDIAVEWESNGQPENNYKTTPPVLDSDGSFFLYSKLTVDKSRWQQGNVFSCSVLHEALHSHYTQKSLSLSPGK

SEQ ID NO: 36128 - protein, 117 aa, Artificial Sequence; identical to SEQ ID NO: 33034
  Description of Artificial Sequence: Synthetic polypeptide
  VH of XENP022856

SEQ ID NO: 36129 - protein, 5 aa, Artificial Sequence
  Description of Artificial Sequence: Synthetic peptide
  XENP022856 vhCDR1
HYGMN

SEQ ID NO: 36130 - protein, 17 aa, Artificial Sequence
  Description of Artificial Sequence: Synthetic peptide
  XENP022856 vhCDR2
WINTYTGEPTYADGFTG

SEQ ID NO: 36131 - protein, 8 aa, Artificial Sequence
  Description of Artificial Sequence: Synthetic peptide
  XENP022856 vhCDR3
DYYGSSPY

SEQ ID NO: 36132 - protein, 219 aa, Artificial Sequence; identical to SEQ ID NO: 33008
  Description of Artificial Sequence: Synthetic polypeptide
  XENP022856 1C11_H3L3_IgG1_PVA_/S267K/M428L/N434S Light Chain

SEQ ID NO: 36133 - protein, 112 aa, Artificial Sequence; identical to SEQ ID NO: 33009
  Description of Artificial Sequence: Synthetic polypeptide
  VL of XENP022856

SEQ ID NO: 36134 - protein, 16 aa, Artificial Sequence
  Description of Artificial Sequence: Synthetic peptide
  XENP022856 vlCDR1
KSSQSIVHSNGNTYLE

SEQ ID NO: 36135 - protein, 7 aa, Artificial Sequence
  Description of Artificial Sequence: Synthetic peptide
  XENP022856 vlCDR2
KVSNRFS

SEQ ID NO: 36136 - protein, 9 aa, Artificial Sequence
  Description of Artificial Sequence: Synthetic peptide
  XENP022856 vlCDR3
FQGSHVPNT

SEQ ID NO: 36137 - protein, 449 aa, Artificial Sequence
  Description of Artificial Sequence: Synthetic polypeptide
  XENP022857 2E9_H1L1_IgG1_PVA_/S267K/M428L/N434S Heavy Chain
QVQLVQSGAEVKKPGASVKVSCKASGYAFTNYWLGWVRQAPGQGLEWMGNFYPGSSNTYYNEKFQGRVTMTADKSISTAYMELSRLRSDDTAVYFCARHYGTNYRYFDVWGAGTLVTVSSASTKGPSVFPLAPSSKSTSGGTAALGCLVKDYFPEPVTVSWNSGALTSGVHTFPAVLQSSGLYSLSSVVTVPSSSLGTQTYICNVNHKPSNTKVDKKVEPKSCDKTHTCPPCPAPPVAGPSVFLFPPKPKDTLMISRTPEVTCVVVDVKHEDPEVKFNWYVDGVEVHNAKTKPREEQYNSTYRVVSVLTVLHQDWLNGKEYKCKVSNKALPAPIEKTISKAKGQPREPQVYTLPPSREEMTKNQVSLTCLVKGFYPSDIAVEWESNGQPENNYKTTPPVLDSDGSFFLYSKLTVDKSRWQQGNVFSCSVLHEALHSHYTQKSLSLSPGK

SEQ ID NO: 36138 - protein, 120 aa, Artificial Sequence; identical to SEQ ID NO: 11412
  Description of Artificial Sequence: Synthetic polypeptide
  VH of XENP022857

SEQ ID NO: 36139 - protein, 5 aa, Artificial Sequence
  Description of Artificial Sequence: Synthetic peptide
  XENP022857 vhCDR1
NYWLG

SEQ ID NO: 36140 - protein, 17 aa, Artificial Sequence
  Description of Artificial Sequence: Synthetic peptide
  XENP022857 vhCDR2
NFYPGSSNTYYNEKFQG

SEQ ID NO: 36141 - protein, 11 aa, Artificial Sequence
  Description of Artificial Sequence: Synthetic peptide
  XENP022857 vhCDR3
HYGTNYRYFDV

SEQ ID NO: 36142 - protein, 214 aa, Artificial Sequence; identical to SEQ ID NO: 17080
  Description of Artificial Sequence: Synthetic polypeptide
  XENP022857 2E9_H1L1_IgG1_PVA_/S267K/M428L/N434S Light Chain

SEQ ID NO: 36143 - protein, 107 aa, Artificial Sequence; identical to SEQ ID NO: 11413
  Description of Artificial Sequence: Synthetic polypeptide
  VL of XENP022857

SEQ ID NO: 36144 - protein, 11 aa, Artificial Sequence
  Description of Artificial Sequence: Synthetic peptide
  XENP022857 vlCDR1
RASQSVSNDVA

SEQ ID NO: 36145 - protein, 7 aa, Artificial Sequence
  Description of Artificial Sequence: Synthetic peptide
  XENP022857 vlCDR2
YASNRYT

SEQ ID NO: 36146 - protein, 9 aa, Artificial Sequence
  Description of Artificial Sequence: Synthetic peptide
  XENP022857 vlCDR3
QQDYSSPYT

SEQ ID NO: 36147 - protein, 447 aa, Artificial Sequence
  Description of Artificial Sequence: Synthetic polypeptide
  XENP022858 9C6_H1.1_L1_Fab-1G6_L1.194_H1.279_scFv Fab-Fc Heavy Chain
QVQLKESGAEVKKPGASVKVSCKVSGFSLTGYGVNWVRQAPGQGLEWMGMIWIDGSTDYNSKFQGRVTMTKDNSKSTVYMELSSLRSEDTAVYYCARDRPDGRAMDYWGQGTMVTVSSASTKGPSVFPLAPSSKSTSGGTAALGCLVKDYFPEPVTVSWNSGALTSGVHTFPAVLQSSGLYSLSSVVTVPSSSLGTQTYICNVNHKPSDTKVDKKVEPKSCDKTHTCPPCPAPPVAGPSVFLFPPKPKDTLMISRTPEVTCVVVDVKHEDPEVKFNWYVDGVEVHNAKTKPREEEYNSTYRVVSVLTVLHQDWLNGKEYKCKVSNKALPAPIEKTISKAKGQPREPQVYTLPPSREEMTKNQVSLTCDVSGFYPSDIAVEWESDGQPENNYKTTPPVLDSDGSFFLYSKLTVDKSRWEQGDVFSCSVLHEALHSHYTQKSLSLSPGK

SEQ ID NO: 36148 - protein, 118 aa, Artificial Sequence; identical to SEQ ID NO: 21205
  Description of Artificial Sequence: Synthetic polypeptide
  VH of XENP022858

SEQ ID NO: 36149 - protein, 5 aa, Artificial Sequence
  Description of Artificial Sequence: Synthetic peptide
  XENP022858 vhCDR1
GYGVN

SEQ ID NO: 36150 - protein, 16 aa, Artificial Sequence
  Description of Artificial Sequence: Synthetic peptide
  XENP022858 vhCDR2
MIWIDGSTDYNSKFQG

SEQ ID NO: 36151 - protein, 10 aa, Artificial Sequence
  Description of Artificial Sequence: Synthetic peptide
  XENP022858 vhCDR3
DRPDGRAMDY

SEQ ID NO: 36152 - protein, 480 aa, Artificial Sequence; identical to SEQ ID NO: 23581
  Description of Artificial Sequence: Synthetic polypeptide
  XENP022858 9C6_H1.1_L1_Fab-1G6_L1.194_H1.279_scFv scFv-Fc Heavy Chain

SEQ ID NO: 36153 - protein, 107 aa, Artificial Sequence; identical to SEQ ID NO: 10999
  Description of Artificial Sequence: Synthetic polypeptide
  VH of XENP022858

SEQ ID NO: 36154 - protein, 122 aa, Artificial Sequence; identical to SEQ ID NO: 10908
  Description of Artificial Sequence: Synthetic polypeptide
  VL of XENP022858

SEQ ID NO: 36155 - protein, 231 aa, Artificial Sequence; identical to SEQ ID NO: 21572
  Description of Artificial Sequence: Synthetic polypeptide
  Fc chain of XENP022858

SEQ ID NO: 36156 - protein, 11 aa, Artificial Sequence
  Description of Artificial Sequence: Synthetic peptide
  XENP022858 vhCDR1
RASQSVGNDVA

SEQ ID NO: 36157 - protein, 7 aa, Artificial Sequence
  Description of Artificial Sequence: Synthetic peptide
  XENP022858 vhCDR2
YASHRYT

SEQ ID NO: 36158 - protein, 9 aa, Artificial Sequence
  Description of Artificial Sequence: Synthetic peptide
  XENP022858 vhCDR3
QQDFSSPRT

SEQ ID NO: 36159 - protein, 5 aa, Artificial Sequence
  Description of Artificial Sequence: Synthetic peptide
  XENP022858 vlCDR1
NYWMN

SEQ ID NO: 36160 - protein, 19 aa, Artificial Sequence
  Description of Artificial Sequence: Synthetic peptide
  XENP022858 vlCDR2
EIRLYSNNYATHYAESVKG

SEQ ID NO: 36161 - protein, 11 aa, Artificial Sequence
  Description of Artificial Sequence: Synthetic peptide
  XENP022858 vlCDR3
YYGNYGGYFDV

SEQ ID NO: 36162 - protein, 213 aa, Artificial Sequence; identical to SEQ ID NO: 21050
  Description of Artificial Sequence: Synthetic polypeptide
  XENP022858 9C6_H1.1_L1_Fab-1G6_L1.194_H1.279_scFv Light Chain

SEQ ID NO: 36163 - protein, 106 aa, Artificial Sequence; identical to SEQ ID NO: 21051
  Description of Artificial Sequence: Synthetic polypeptide
  VL of XENP022858

SEQ ID NO: 36164 - protein, 11 aa, Artificial Sequence
  Description of Artificial Sequence: Synthetic peptide
  XENP022858 vlCDR1
KASQSVSNDVA

SEQ ID NO: 36165 - protein, 7 aa, Artificial Sequence
  Description of Artificial Sequence: Synthetic peptide
  XENP022858 vlCDR2
YASNRYT

SEQ ID NO: 36166 - protein, 8 aa, Artificial Sequence
  Description of Artificial Sequence: Synthetic peptide
  XENP022858 vlCDR3
QQDYSSPT

SEQ ID NO: 36167 - protein, 446 aa, Artificial Sequence
  Description of Artificial Sequence: Synthetic polypeptide
  XENP022726 1C11_H1L3_Fab-[CTLA-4]_H3.23_L0.129_scFv Fab-Fc Heavy Chain
QIQLVQSGAEVKKPGASVKVSCKASGYTFTHYGMNWVRQAPGQGLEWMGWINTYTGEPTYADKFQGRVTMTLDTSTSTAYMELSSLRSEDTAVYFCARDYYGSSPYWGQGTLVTVSSASTKGPSVFPLAPSSKSTSGGTAALGCLVKDYFPEPVTVSWNSGALTSGVHTFPAVLQSSGLYSLSSVVTVPSSSLGTQTYICNVNHKPSDTKVDKKVEPKSCDKTHTCPPCPAPPVAGPSVFLFPPKPKDTLMISRTPEVTCVVVDVKHEDPEVKFNWYVDGVEVHNAKTKPREEEYNSTYRVVSVLTVLHQDWLNGKEYKCKVSNKALPAPIEKTISKAKGQPREPQVYTLPPSREEMTKNQVSLTCDVSGFYPSDIAVEWESDGQPENNYKTTPPVLDSDGSFFLYSKLTVDKSRWEQGDVFSCSVMHEALHNHYTQKSLSLSPGK

SEQ ID NO: 36168 - protein, 117 aa, Artificial Sequence; identical to SEQ ID NO: 33004
  Description of Artificial Sequence: Synthetic polypeptide
  VH of XENP022726

SEQ ID NO: 36169 - protein, 5 aa, Artificial Sequence
  Description of Artificial Sequence: Synthetic peptide
  XENP022726 vhCDR1
HYGMN

SEQ ID NO: 36170 - protein, 17 aa, Artificial Sequence
  Description of Artificial Sequence: Synthetic peptide
  XENP022726 vhCDR2
WINTYTGEPTYADKFQG

SEQ ID NO: 36171 - protein, 8 aa, Artificial Sequence
  Description of Artificial Sequence: Synthetic peptide
  XENP022726 vhCDR3
DYYGSSPY

SEQ ID NO: 36172 - protein, 477 aa, Artificial Sequence; identical to SEQ ID NO: 21669
  Description of Artificial Sequence: Synthetic polypeptide
  XENP022726 1C11_H1L3_Fab-[CTLA-4]_H3.23_L0.129_scFv scFv-Fc Heavy Chain

SEQ ID NO: 36173 - protein, 118 aa, Artificial Sequence; identical to SEQ ID NO: 2632
  Description of Artificial Sequence: Synthetic polypeptide
  VH of XENP022726

SEQ ID NO: 36174 - protein, 108 aa, Artificial Sequence; identical to SEQ ID NO: 2768
  Description of Artificial Sequence: Synthetic polypeptide
  VL of XENP022726

SEQ ID NO: 36175 - protein, 231 aa, Artificial Sequence; identical to SEQ ID NO: 21532
  Description of Artificial Sequence: Synthetic polypeptide
  Fc chain of XENP022726

SEQ ID NO: 36176 - protein, 5 aa, Artificial Sequence
  Description of Artificial Sequence: Synthetic peptide
  XENP022726 vhCDR1
SYTMH

SEQ ID NO: 36177 - protein, 17 aa, Artificial Sequence
  Description of Artificial Sequence: Synthetic peptide
  XENP022726 vhCDR2
FISYDGNYKYYADSVKG

SEQ ID NO: 36178 - protein, 9 aa, Artificial Sequence
  Description of Artificial Sequence: Synthetic peptide
  XENP022726 vhCDR3
GGHLGPFDL

SEQ ID NO: 36179 - protein, 12 aa, Artificial Sequence
  Description of Artificial Sequence: Synthetic peptide
  XENP022726 vlCDR1
RASQSVGSSYLA

SEQ ID NO: 36180 - protein, 7 aa, Artificial Sequence
  Description of Artificial Sequence: Synthetic peptide
  XENP022726 vlCDR2
GASSRAT

SEQ ID NO: 36181 - protein, 9 aa, Artificial Sequence
  Description of Artificial Sequence: Synthetic peptide
  XENP022726 vlCDR3
QQYGSSPWT

SEQ ID NO: 36182 - protein, 219 aa, Artificial Sequence; identical to SEQ ID NO: 33008
  Description of Artificial Sequence: Synthetic polypeptide
  XENP022726 1C11_H1L3_Fab-[CTLA-4]_H3.23_L0.129_scFv Light Chain

SEQ ID NO: 36183 - protein, 112 aa, Artificial Sequence; identical to SEQ ID NO: 33009
  Description of Artificial Sequence: Synthetic polypeptide
  VL of XENP022726

SEQ ID NO: 36184 - protein, 16 aa, Artificial Sequence
  Description of Artificial Sequence: Synthetic peptide
  XENP022726 vlCDR1
KSSQSIVHSNGNTYLE

SEQ ID NO: 36185 - protein, 7 aa, Artificial Sequence
  Description of Artificial Sequence: Synthetic peptide
  XENP022726 vlCDR2
KVSNRFS

SEQ ID NO: 36186 - protein, 9 aa, Artificial Sequence
  Description of Artificial Sequence: Synthetic peptide
  XENP022726 vlCDR3
FQGSHVPNT

SEQ ID NO: 36187 - protein, 446 aa, Artificial Sequence
  Description of Artificial Sequence: Synthetic polypeptide
  XENP022727 1C11_H2L1_Fab-[CTLA-4]_H3.23_L0.129_scFv Fab-Fc Heavy Chain
EIQLLESGGGLVQPGGSLRLSCAASGYTFTHYGMNWVRQAPGKGLEWVSWINTYTGEPTYADSVKGRFTISLDTSKSTAYLQMNSLRAEDTAVYFCARDYYGSSPYWGQGTLVTVSSASTKGPSVFPLAPSSKSTSGGTAALGCLVKDYFPEPVTVSWNSGALTSGVHTFPAVLQSSGLYSLSSVVTVPSSSLGTQTYICNVNHKPSDTKVDKKVEPKSCDKTHTCPPCPAPPVAGPSVFLFPPKPKDTLMISRTPEVTCVVVDVKHEDPEVKFNWYVDGVEVHNAKTKPREEEYNSTYRVVSVLTVLHQDWLNGKEYKCKVSNKALPAPIEKTISKAKGQPREPQVYTLPPSREEMTKNQVSLTCDVSGFYPSDIAVEWESDGQPENNYKTTPPVLDSDGSFFLYSKLTVDKSRWEQGDVFSCSVMHEALHNHYTQKSLSLSPGK

SEQ ID NO: 36188 - protein, 117 aa, Artificial Sequence; identical to SEQ ID NO: 33014
  Description of Artificial Sequence: Synthetic polypeptide
  VH of XENP022727

SEQ ID NO: 36189 - protein, 5 aa, Artificial Sequence
  Description of Artificial Sequence: Synthetic peptide
  XENP022727 vhCDR1
HYGMN

SEQ ID NO: 36190 - protein, 17 aa, Artificial Sequence
  Description of Artificial Sequence: Synthetic peptide
  XENP022727 vhCDR2
WINTYTGEPTYADSVKG

SEQ ID NO: 36191 - protein, 8 aa, Artificial Sequence
  Description of Artificial Sequence: Synthetic peptide
  XENP022727 vhCDR3
DYYGSSPY

SEQ ID NO: 36192 - protein, 477 aa, Artificial Sequence; identical to SEQ ID NO: 21669
  Description of Artificial Sequence: Synthetic polypeptide
  XENP022727 1C11_H2L1_Fab-[CTLA-4]_H3.23_L0.129_scFv scFv-Fc Heavy Chain

SEQ ID NO: 36193 - protein, 118 aa, Artificial Sequence; identical to SEQ ID NO: 2632
  Description of Artificial Sequence: Synthetic polypeptide
  VH of XENP022727

SEQ ID NO: 36194 - protein, 108 aa, Artificial Sequence; identical to SEQ ID NO: 2768
  Description of Artificial Sequence: Synthetic polypeptide
  VL of XENP022727

SEQ ID NO: 36195 - protein, 231 aa, Artificial Sequence; identical to SEQ ID NO: 21532
  Description of Artificial Sequence: Synthetic polypeptide
  Fc chain of XENP022727

SEQ ID NO: 36196 - protein, 5 aa, Artificial Sequence
  Description of Artificial Sequence: Synthetic peptide
  XENP022727 vhCDR1
SYTMH

SEQ ID NO: 36197 - protein, 17 aa, Artificial Sequence
  Description of Artificial Sequence: Synthetic peptide
  XENP022727 vhCDR2
FISYDGNYKYYADSVKG

SEQ ID NO: 36198 - protein, 9 aa, Artificial Sequence
  Description of Artificial Sequence: Synthetic peptide
  XENP022727 vhCDR3
GGHLGPFDL

SEQ ID NO: 36199 - protein, 12 aa, Artificial Sequence
  Description of Artificial Sequence: Synthetic peptide
  XENP022727 vlCDR1
RASQSVGSSYLA

SEQ ID NO: 36200 - protein, 7 aa, Artificial Sequence
  Description of Artificial Sequence: Synthetic peptide
  XENP022727 vlCDR2
GASSRAT

SEQ ID NO: 36201 - protein, 9 aa, Artificial Sequence
  Description of Artificial Sequence: Synthetic peptide
  XENP022727 vlCDR3
QQYGSSPWT

SEQ ID NO: 36202 - protein, 219 aa, Artificial Sequence; identical to SEQ ID NO: 33018
  Description of Artificial Sequence: Synthetic polypeptide
  XENP022727 1C11_H2L1_Fab-[CTLA-4]_H3.23_L0.129_scFv Light Chain

SEQ ID NO: 36203 - protein, 112 aa, Artificial Sequence; identical to SEQ ID NO: 33019
  Description of Artificial Sequence: Synthetic polypeptide
  VL of XENP022727

SEQ ID NO: 36204 - protein, 16 aa, Artificial Sequence
  Description of Artificial Sequence: Synthetic peptide
  XENP022727 vlCDR1
RSSQSIVHSNGNTYLE

SEQ ID NO: 36205 - protein, 7 aa, Artificial Sequence
  Description of Artificial Sequence: Synthetic peptide
  XENP022727 vlCDR2
KVSNRFS

SEQ ID NO: 36206 - protein, 9 aa, Artificial Sequence
  Description of Artificial Sequence: Synthetic peptide
  XENP022727 vlCDR3
FQGSHVPNT

SEQ ID NO: 36207 - protein, 446 aa, Artificial Sequence; identical to SEQ ID NO: 36187
  Description of Artificial Sequence: Synthetic polypeptide
  XENP022728 1C11_H2L2_Fab-[CTLA-4]_H3.23_L0.129_scFv Fab-Fc Heavy Chain

SEQ ID NO: 36208 - protein, 117 aa, Artificial Sequence; identical to SEQ ID NO: 33014
  Description of Artificial Sequence: Synthetic polypeptide
  VH of XENP022728

SEQ ID NO: 36209 - protein, 5 aa, Artificial Sequence
  Description of Artificial Sequence: Synthetic peptide
  XENP022728 vhCDR1
HYGMN

SEQ ID NO: 36210 - protein, 17 aa, Artificial Sequence
  Description of Artificial Sequence: Synthetic peptide
  XENP022728 vhCDR2
WINTYTGEPTYADSVKG

SEQ ID NO: 36211 - protein, 8 aa, Artificial Sequence
  Description of Artificial Sequence: Synthetic peptide
  XENP022728 vhCDR3
DYYGSSPY

SEQ ID NO: 36212 - protein, 477 aa, Artificial Sequence; identical to SEQ ID NO: 21669
  Description of Artificial Sequence: Synthetic polypeptide
  XENP022728 1C11_H2L2_Fab-[CTLA-4]_H3.23_L0.129_scFv scFv-Fc Heavy Chain

SEQ ID NO: 36213 - protein, 118 aa, Artificial Sequence; identical to SEQ ID NO: 2632
  Description of Artificial Sequence: Synthetic polypeptide
  VH of XENP022728

SEQ ID NO: 36214 - protein, 108 aa, Artificial Sequence; identical to SEQ ID NO: 2768
  Description of Artificial Sequence: Synthetic polypeptide
  VL of XENP022728

SEQ ID NO: 36215 - protein, 231 aa, Artificial Sequence; identical to SEQ ID NO: 21532
  Description of Artificial Sequence: Synthetic polypeptide
  Fc chain of XENP022728

SEQ ID NO: 36216 - protein, 5 aa, Artificial Sequence
  Description of Artificial Sequence: Synthetic peptide
  XENP022728 vhCDR1
SYTMH

SEQ ID NO: 36217 - protein, 17 aa, Artificial Sequence
  Description of Artificial Sequence: Synthetic peptide
  XENP022728 vhCDR2
FISYDGNYKYYADSVKG

SEQ ID NO: 36218 - protein, 9 aa, Artificial Sequence
  Description of Artificial Sequence: Synthetic peptide
  XENP022728 vhCDR3
GGHLGPFDL

SEQ ID NO: 36219 - protein, 12 aa, Artificial Sequence
  Description of Artificial Sequence: Synthetic peptide
  XENP022728 vlCDR1
RASQSVGSSYLA

SEQ ID NO: 36220 - protein, 7 aa, Artificial Sequence
  Description of Artificial Sequence: Synthetic peptide
  XENP022728 vlCDR2
GASSRAT

SEQ ID NO: 36221 - protein, 9 aa, Artificial Sequence
  Description of Artificial Sequence: Synthetic peptide
  XENP022728 vlCDR3
QQYGSSPWT

SEQ ID NO: 36222 - protein, 219 aa, Artificial Sequence; identical to SEQ ID NO: 33028
  Description of Artificial Sequence: Synthetic polypeptide
  XENP022728 1C11_H2L2_Fab-[CTLA-4]_H3.23_L0.129_scFv Light Chain

SEQ ID NO: 36223 - protein, 112 aa, Artificial Sequence; identical to SEQ ID NO: 33029
  Description of Artificial Sequence: Synthetic polypeptide
  VL of XENP022728

SEQ ID NO: 36224 - protein, 16 aa, Artificial Sequence
  Description of Artificial Sequence: Synthetic peptide
  XENP022728 vlCDR1
RSSQSIVHSNGNTYLE

SEQ ID NO: 36225 - protein, 7 aa, Artificial Sequence
  Description of Artificial Sequence: Synthetic peptide
  XENP022728 vlCDR2
KVSNRFS

SEQ ID NO: 36226 - protein, 9 aa, Artificial Sequence
  Description of Artificial Sequence: Synthetic peptide
  XENP022728 vlCDR3
FQGSHVPNT

SEQ ID NO: 36227 - protein, 446 aa, Artificial Sequence
  Description of Artificial Sequence: Synthetic polypeptide
  XENP022729 1C11_H3L3_Fab-[CTLA-4]_H3.23_L0.129_scFv Fab-Fc Heavy Chain
QIQLVQSGSELKKPGASVKVSCKASGYTFTHYGMNWVRQAPGQGLEWMGWINTYTGEPTYADGFTGRFVFSLDTSVSTAYLQISSLKAEDTAVYFCARDYYGSSPYWGQGTLVTVSSASTKGPSVFPLAPSSKSTSGGTAALGCLVKDYFPEPVTVSWNSGALTSGVHTFPAVLQSSGLYSLSSVVTVPSSSLGTQTYICNVNHKPSDTKVDKKVEPKSCDKTHTCPPCPAPPVAGPSVFLFPPKPKDTLMISRTPEVTCVVVDVKHEDPEVKFNWYVDGVEVHNAKTKPREEEYNSTYRVVSVLTVLHQDWLNGKEYKCKVSNKALPAPIEKTISKAKGQPREPQVYTLPPSREEMTKNQVSLTCDVSGFYPSDIAVEWESDGQPENNYKTTPPVLDSDGSFFLYSKLTVDKSRWEQGDVFSCSVMHEALHNHYTQKSLSLSPGK

SEQ ID NO: 36228 - protein, 117 aa, Artificial Sequence; identical to SEQ ID NO: 33034
  Description of Artificial Sequence: Synthetic polypeptide
  VH of XENP022729

SEQ ID NO: 36229 - protein, 5 aa, Artificial Sequence
  Description of Artificial Sequence: Synthetic peptide
  XENP022729 vhCDR1
HYGMN

SEQ ID NO: 36230 - protein, 17 aa, Artificial Sequence
  Description of Artificial Sequence: Synthetic peptide
  XENP022729 vhCDR2
WINTYTGEPTYADGFTG

SEQ ID NO: 36231 - protein, 8 aa, Artificial Sequence
  Description of Artificial Sequence: Synthetic peptide
  XENP022729 vhCDR3
DYYGSSPY

SEQ ID NO: 36232 - protein, 477 aa, Artificial Sequence; identical to SEQ ID NO: 21669
  Description of Artificial Sequence: Synthetic polypeptide
  XENP022729 1C11_H3L3_Fab-[CTLA-4]_H3.23_L0.129_scFv scFv-Fc Heavy Chain

SEQ ID NO: 36233 - protein, 118 aa, Artificial Sequence; identical to SEQ ID NO: 2632
  Description of Artificial Sequence: Synthetic polypeptide
  VH of XENP022729

SEQ ID NO: 36234 - protein, 108 aa, Artificial Sequence; identical to SEQ ID NO: 2768
  Description of Artificial Sequence: Synthetic polypeptide
  VL of XENP022729

SEQ ID NO: 36235 - protein, 231 aa, Artificial Sequence; identical to SEQ ID NO: 21532
  Description of Artificial Sequence: Synthetic polypeptide
  Fc chain of XENP022729

SEQ ID NO: 36236 - protein, 5 aa, Artificial Sequence
  Description of Artificial Sequence: Synthetic peptide
  XENP022729 vhCDR1
SYTMH

SEQ ID NO: 36237 - protein, 17 aa, Artificial Sequence
  Description of Artificial Sequence: Synthetic peptide
  XENP022729 vhCDR2
FISYDGNYKYYADSVKG

SEQ ID NO: 36238 - protein, 9 aa, Artificial Sequence
  Description of Artificial Sequence: Synthetic peptide
  XENP022729 vhCDR3
GGHLGPFDL

SEQ ID NO: 36239 - protein, 12 aa, Artificial Sequence
  Description of Artificial Sequence: Synthetic peptide
  XENP022729 vlCDR1
RASQSVGSSYLA

SEQ ID NO: 36240 - protein, 7 aa, Artificial Sequence
  Description of Artificial Sequence: Synthetic peptide
  XENP022729 vlCDR2
GASSRAT

SEQ ID NO: 36241 - protein, 9 aa, Artificial Sequence
  Description of Artificial Sequence: Synthetic peptide
  XENP022729 vlCDR3
QQYGSSPWT

SEQ ID NO: 36242 - protein, 219 aa, Artificial Sequence; identical to SEQ ID NO: 33008
  Description of Artificial Sequence: Synthetic polypeptide
  XENP022729 1C11_H3L3_Fab-[CTLA-4]_H3.23_L0.129_scFv Light Chain

SEQ ID NO: 36243 - protein, 112 aa, Artificial Sequence; identical to SEQ ID NO: 33009
  Description of Artificial Sequence: Synthetic polypeptide
  VL of XENP022729

SEQ ID NO: 36244 - protein, 16 aa, Artificial Sequence
  Description of Artificial Sequence: Synthetic peptide
  XENP022729 vlCDR1
KSSQSIVHSNGNTYLE

SEQ ID NO: 36245 - protein, 7 aa, Artificial Sequence
  Description of Artificial Sequence: Synthetic peptide
  XENP022729 vlCDR2
KVSNRFS

SEQ ID NO: 36246 - protein, 9 aa, Artificial Sequence
  Description of Artificial Sequence: Synthetic peptide
  XENP022729 vlCDR3
FQGSHVPNT

SEQ ID NO: 36247 - protein, 449 aa, Artificial Sequence
  Description of Artificial Sequence: Synthetic polypeptide
  XENP022836 2E9_H1L1_Fab-[CTLA-4]_H3.23_L0.129_scFv HC-Fab
QVQLVQSGAEVKKPGASVKVSCKASGYAFTNYWLGWVRQAPGQGLEWMGNFYPGSSNTYYNEKFQGRVTMTADKSISTAYMELSRLRSDDTAVYFCARHYGTNYRYFDVWGAGTLVTVSSASTKGPSVFPLAPSSKSTSGGTAALGCLVKDYFPEPVTVSWNSGALTSGVHTFPAVLQSSGLYSLSSVVTVPSSSLGTQTYICNVNHKPSDTKVDKKVEPKSCDKTHTCPPCPAPPVAGPSVFLFPPKPKDTLMISRTPEVTCVVVDVKHEDPEVKFNWYVDGVEVHNAKTKPREEEYNSTYRVVSVLTVLHQDWLNGKEYKCKVSNKALPAPIEKTISKAKGQPREPQVYTLPPSREEMTKNQVSLTCDVSGFYPSDIAVEWESDGQPENNYKTTPPVLDSDGSFFLYSKLTVDKSRWEQGDVFSCSVMHEALHNHYTQKSLSLSPGK

SEQ ID NO: 36248 - protein, 120 aa, Artificial Sequence; identical to SEQ ID NO: 11412
  Description of Artificial Sequence: Synthetic polypeptide
  VH of XENP022836

SEQ ID NO: 36249 - protein, 5 aa, Artificial Sequence
  Description of Artificial Sequence: Synthetic peptide
  XENP022836 vhCDR1
NYWLG

SEQ ID NO: 36250 - protein, 17 aa, Artificial Sequence
  Description of Artificial Sequence: Synthetic peptide
  XENP022836 vhCDR2
NFYPGSSNTYYNEKFQG

SEQ ID NO: 36251 - protein, 11 aa, Artificial Sequence
  Description of Artificial Sequence: Synthetic peptide
  XENP022836 vhCDR3
HYGTNYRYFDV

SEQ ID NO: 36252 - protein, 477 aa, Artificial Sequence; identical to SEQ ID NO: 21669
  Description of Artificial Sequence: Synthetic polypeptide
  XENP022836 2E9_H1L1_Fab-[CTLA-4]_H3.23_L0.129_scFv HC-scFV

SEQ ID NO: 36253 - protein, 118 aa, Artificial Sequence; identical to SEQ ID NO: 2632
  Description of Artificial Sequence: Synthetic polypeptide
  VH of XENP022836

SEQ ID NO: 36254 - protein, 108 aa, Artificial Sequence; identical to SEQ ID NO: 2768
  Description of Artificial Sequence: Synthetic polypeptide
  VL of XENP022836

SEQ ID NO: 36255 - protein, 231 aa, Artificial Sequence; identical to SEQ ID NO: 21532
  Description of Artificial Sequence: Synthetic polypeptide
  Fc chain of XENP022836

SEQ ID NO: 36256 - protein, 5 aa, Artificial Sequence
  Description of Artificial Sequence: Synthetic peptide
  XENP022836 vhCDR1
SYTMH

SEQ ID NO: 36257 - protein, 17 aa, Artificial Sequence
  Description of Artificial Sequence: Synthetic peptide
  XENP022836 vhCDR2
FISYDGNYKYYADSVKG

SEQ ID NO: 36258 - protein, 9 aa, Artificial Sequence
  Description of Artificial Sequence: Synthetic peptide
  XENP022836 vhCDR3
GGHLGPFDL

SEQ ID NO: 36259 - protein, 12 aa, Artificial Sequence
  Description of Artificial Sequence: Synthetic peptide
  XENP022836 vlCDR1
RASQSVGSSYLA

SEQ ID NO: 36260 - protein, 7 aa, Artificial Sequence
  Description of Artificial Sequence: Synthetic peptide
  XENP022836 vlCDR2
GASSRAT

SEQ ID NO: 36261 - protein, 9 aa, Artificial Sequence
  Description of Artificial Sequence: Synthetic peptide
  XENP022836 vlCDR3
QQYGSSPWT

SEQ ID NO: 36262 - protein, 214 aa, Artificial Sequence; identical to SEQ ID NO: 17080
  Description of Artificial Sequence: Synthetic polypeptide
  XENP022836 2E9_H1L1_Fab-[CTLA-4]_H3.23_L0.129_scFv Light Chain

SEQ ID NO: 36263 - protein, 107 aa, Artificial Sequence; identical to SEQ ID NO: 11413
  Description of Artificial Sequence: Synthetic polypeptide
  VL of XENP022836

SEQ ID NO: 36264 - protein, 11 aa, Artificial Sequence
  Description of Artificial Sequence: Synthetic peptide
  XENP022836 vlCDR1
RASQSVSNDVA

SEQ ID NO: 36265 - protein, 7 aa, Artificial Sequence
  Description of Artificial Sequence: Synthetic peptide
  XENP022836 vlCDR2
YASNRYT

SEQ ID NO: 36266 - protein, 9 aa, Artificial Sequence
  Description of Artificial Sequence: Synthetic peptide
  XENP022836 vlCDR3
QQDYSSPYT

SEQ ID NO: 36267 - protein, 446 aa, Artificial Sequence
  Description of Artificial Sequence: Synthetic polypeptide
  XENP022854 1C11_H3L3_Fab-[CTLA-4]_H3.23_L0.129_[CTLA-4]_scFv Fab-Fc Heavy Chain
QIQLVQSGSELKKPGASVKVSCKASGYTFTHYGMNWVRQAPGQGLEWMGWINTYTGEPTYADGFTGRFVFSLDTSVSTAYLQISSLKAEDTAVYFCARDYYGSSPYWGQGTLVTVSSASTKGPSVFPLAPSSKSTSGGTAALGCLVKDYFPEPVTVSWNSGALTSGVHTFPAVLQSSGLYSLSSVVTVPSSSLGTQTYICNVNHKPSDTKVDKKVEPKSCDKTHTCPPCPAPPVAGPSVFLFPPKPKDTLMISRTPEVTCVVVDVKHEDPEVKFNWYVDGVEVHNAKTKPREEEYNSTYRVVSVLTVLHQDWLNGKEYKCKVSNKALPAPIEKTISKAKGQPREPQVYTLPPSREEMTKNQVSLTCDVSGFYPSDIAVEWESDGQPENNYKTTPPVLDSDGSFFLYSKLTVDKSRWEQGDVFSCSVLHEALHSHYTQKSLSLSPGK

SEQ ID NO: 36268 - protein, 117 aa, Artificial Sequence; identical to SEQ ID NO: 33034
  Description of Artificial Sequence: Synthetic polypeptide
  VH of XENP022854

SEQ ID NO: 36269 - protein, 5 aa, Artificial Sequence
  Description of Artificial Sequence: Synthetic peptide
  XENP022854 vhCDR1
HYGMN

SEQ ID NO: 36270 - protein, 17 aa, Artificial Sequence
  Description of Artificial Sequence: Synthetic peptide
  XENP022854 vhCDR2
WINTYTGEPTYADGFTG

SEQ ID NO: 36271 - protein, 8 aa, Artificial Sequence
  Description of Artificial Sequence: Synthetic peptide
  XENP022854 vhCDR3
DYYGSSPY

SEQ ID NO: 36272 - protein, 477 aa, Artificial Sequence; identical to SEQ ID NO: 35612
  Description of Artificial Sequence: Synthetic polypeptide
  XENP022854 1C11_H3L3_Fab-[CTLA-4]_H3.23_L0.129_[CTLA-4]_scFv scFv-Fc Heavy Chain

SEQ ID NO: 36273 - protein, 118 aa, Artificial Sequence; identical to SEQ ID NO: 2632
  Description of Artificial Sequence: Synthetic polypeptide
  VH of XENP022854

SEQ ID NO: 36274 - protein, 108 aa, Artificial Sequence; identical to SEQ ID NO: 2768
  Description of Artificial Sequence: Synthetic polypeptide
  VL of XENP022854

SEQ ID NO: 36275 - protein, 231 aa, Artificial Sequence; identical to SEQ ID NO: 21572
  Description of Artificial Sequence: Synthetic polypeptide
  Fc chain of XENP022854

SEQ ID NO: 36276 - protein, 5 aa, Artificial Sequence
  Description of Artificial Sequence: Synthetic peptide
  XENP022854 vhCDR1
SYTMH

SEQ ID NO: 36277 - protein, 17 aa, Artificial Sequence
  Description of Artificial Sequence: Synthetic peptide
  XENP022854 vhCDR2
FISYDGNYKYYADSVKG

SEQ ID NO: 36278 - protein, 9 aa, Artificial Sequence
  Description of Artificial Sequence: Synthetic peptide
  XENP022854 vhCDR3
GGHLGPFDL

SEQ ID NO: 36279 - protein, 12 aa, Artificial Sequence
  Description of Artificial Sequence: Synthetic peptide
  XENP022854 vlCDR1
RASQSVGSSYLA

SEQ ID NO: 36280 - protein, 7 aa, Artificial Sequence
  Description of Artificial Sequence: Synthetic peptide
  XENP022854 vlCDR2
GASSRAT

SEQ ID NO: 36281 - protein, 9 aa, Artificial Sequence
  Description of Artificial Sequence: Synthetic peptide
  XENP022854 vlCDR3
QQYGSSPWT

SEQ ID NO: 36282 - protein, 219 aa, Artificial Sequence; identical to SEQ ID NO: 33008
  Description of Artificial Sequence: Synthetic polypeptide
  XENP022854 1C11_H3L3_Fab-[CTLA-4]_H3.23_L0.129_[CTLA-4]_scFv Light Chain

SEQ ID NO: 36283 - protein, 112 aa, Artificial Sequence; identical to SEQ ID NO: 33009
  Description of Artificial Sequence: Synthetic polypeptide
  VL of XENP022854

SEQ ID NO: 36284 - protein, 16 aa, Artificial Sequence
  Description of Artificial Sequence: Synthetic peptide
  XENP022854 vlCDR1
KSSQSIVHSNGNTYLE

SEQ ID NO: 36285 - protein, 7 aa, Artificial Sequence
  Description of Artificial Sequence: Synthetic peptide
  XENP022854 vlCDR2
KVSNRFS

SEQ ID NO: 36286 - protein, 9 aa, Artificial Sequence
  Description of Artificial Sequence: Synthetic peptide
  XENP022854 vlCDR3
FQGSHVPNT

SEQ ID NO: 36287 - protein, 449 aa, Artificial Sequence
  Description of Artificial Sequence: Synthetic polypeptide
  XENP022855 2E9_H1L1_Fab-[CTLA-4]_H3.23_L0.129_[CTLA-4]_scFv Fab-Fc Heavy Chain
QVQLVQSGAEVKKPGASVKVSCKASGYAFTNYWLGWVRQAPGQGLEWMGNFYPGSSNTYYNEKFQGRVTMTADKSISTAYMELSRLRSDDTAVYFCARHYGTNYRYFDVWGAGTLVTVSSASTKGPSVFPLAPSSKSTSGGTAALGCLVKDYFPEPVTVSWNSGALTSGVHTFPAVLQSSGLYSLSSVVTVPSSSLGTQTYICNVNHKPSDTKVDKKVEPKSCDKTHTCPPCPAPPVAGPSVFLFPPKPKDTLMISRTPEVTCVVVDVKHEDPEVKFNWYVDGVEVHNAKTKPREEEYNSTYRVVSVLTVLHQDWLNGKEYKCKVSNKALPAPIEKTISKAKGQPREPQVYTLPPSREEMTKNQVSLTCDVSGFYPSDIAVEWESDGQPENNYKTTPPVLDSDGSFFLYSKLTVDKSRWEQGDVFSCSVLHEALHSHYTQKSLSLSPGK

SEQ ID NO: 36288 - protein, 120 aa, Artificial Sequence; identical to SEQ ID NO: 11412
  Description of Artificial Sequence: Synthetic polypeptide
  VH of XENP022855

SEQ ID NO: 36289 - protein, 5 aa, Artificial Sequence
  Description of Artificial Sequence: Synthetic peptide
  XENP022855 vhCDR1
NYWLG

SEQ ID NO: 36290 - protein, 17 aa, Artificial Sequence
  Description of Artificial Sequence: Synthetic peptide
  XENP022855 vhCDR2
NFYPGSSNTYYNEKFQG

SEQ ID NO: 36291 - protein, 11 aa, Artificial Sequence
  Description of Artificial Sequence: Synthetic peptide
  XENP022855 vhCDR3
HYGTNYRYFDV

SEQ ID NO: 36292 - protein, 477 aa, Artificial Sequence; identical to SEQ ID NO: 35612
  Description of Artificial Sequence: Synthetic polypeptide
  XENP022855 2E9_H1L1_Fab-[CTLA-4]_H3.23_L0.129_[CTLA-4]_scFv scFv-Fc Heavy Chain

SEQ ID NO: 36293 - protein, 118 aa, Artificial Sequence; identical to SEQ ID NO: 2632
  Description of Artificial Sequence: Synthetic polypeptide
  VH of XENP022855

SEQ ID NO: 36294 - protein, 108 aa, Artificial Sequence; identical to SEQ ID NO: 2768
  Description of Artificial Sequence: Synthetic polypeptide
  VL of XENP022855

SEQ ID NO: 36295 - protein, 231 aa, Artificial Sequence; identical to SEQ ID NO: 21572
  Description of Artificial Sequence: Synthetic polypeptide
  Fc chain of XENP022855

SEQ ID NO: 36296 - protein, 5 aa, Artificial Sequence
  Description of Artificial Sequence: Synthetic peptide
  XENP022855 vhCDR1
SYTMH

SEQ ID NO: 36297 - protein, 17 aa, Artificial Sequence
  Description of Artificial Sequence: Synthetic peptide
  XENP022855 vhCDR2
FISYDGNYKYYADSVKG

SEQ ID NO: 36298 - protein, 9 aa, Artificial Sequence
  Description of Artificial Sequence: Synthetic peptide
  XENP022855 vhCDR3
GGHLGPFDL

SEQ ID NO: 36299 - protein, 12 aa, Artificial Sequence
  Description of Artificial Sequence: Synthetic peptide
  XENP022855 vlCDR1
RASQSVGSSYLA

SEQ ID NO: 36300 - protein, 7 aa, Artificial Sequence
  Description of Artificial Sequence: Synthetic peptide
  XENP022855 vlCDR2
GASSRAT

SEQ ID NO: 36301 - protein, 9 aa, Artificial Sequence
  Description of Artificial Sequence: Synthetic peptide
  XENP022855 vlCDR3
QQYGSSPWT

SEQ ID NO: 36302 - protein, 214 aa, Artificial Sequence; identical to SEQ ID NO: 17080
  Description of Artificial Sequence: Synthetic polypeptide
  XENP022855 2E9_H1L1_Fab-[CTLA-4]_H3.23_L0.129_[CTLA-4]_scFv Light Chain

SEQ ID NO: 36303 - protein, 107 aa, Artificial Sequence; identical to SEQ ID NO: 11413
  Description of Artificial Sequence: Synthetic polypeptide
  VL of XENP022855

SEQ ID NO: 36304 - protein, 11 aa, Artificial Sequence
  Description of Artificial Sequence: Synthetic peptide
  XENP022855 vlCDR1
RASQSVSNDVA

SEQ ID NO: 36305 - protein, 7 aa, Artificial Sequence
  Description of Artificial Sequence: Synthetic peptide
  XENP022855 vlCDR2
YASNRYT

SEQ ID NO: 36306 - protein, 9 aa, Artificial Sequence
  Description of Artificial Sequence: Synthetic peptide
  XENP022855 vlCDR3
QQDYSSPYT

SEQ ID NO: 36307 - protein, 446 aa, Artificial Sequence; identical to SEQ ID NO: 36227
  Description of Artificial Sequence: Synthetic polypeptide
  XENP022993 1C11_H3L1_Fab-[CTLA-4]_H3.23_L0.129_scFv Fab-Fc Heavy Chain

SEQ ID NO: 36308 - protein, 117 aa, Artificial Sequence; identical to SEQ ID NO: 33034
  Description of Artificial Sequence: Synthetic polypeptide
  VH of XENP022993

SEQ ID NO: 36309 - protein, 5 aa, Artificial Sequence
  Description of Artificial Sequence: Synthetic peptide
  XENP022993 vhCDR1
HYGMN

SEQ ID NO: 36310 - protein, 17 aa, Artificial Sequence
  Description of Artificial Sequence: Synthetic peptide
  XENP022993 vhCDR2
WINTYTGEPTYADGFTG

SEQ ID NO: 36311 - protein, 8 aa, Artificial Sequence
  Description of Artificial Sequence: Synthetic peptide
  XENP022993 vhCDR3
DYYGSSPY

SEQ ID NO: 36312 - protein, 477 aa, Artificial Sequence; identical to SEQ ID NO: 21669
  Description of Artificial Sequence: Synthetic polypeptide
  XENP022993 1C11_H3L1_Fab-[CTLA-4]_H3.23_L0.129_scFv scFv-Fc Heavy Chain

SEQ ID NO: 36313 - protein, 118 aa, Artificial Sequence; identical to SEQ ID NO: 2632
  Description of Artificial Sequence: Synthetic polypeptide
  VH of XENP022993

SEQ ID NO: 36314 - protein, 108 aa, Artificial Sequence; identical to SEQ ID NO: 2768
  Description of Artificial Sequence: Synthetic polypeptide
  VL of XENP022993

SEQ ID NO: 36315 - protein, 231 aa, Artificial Sequence; identical to SEQ ID NO: 21532
  Description of Artificial Sequence: Synthetic polypeptide
  Fc chain of XENP022993

SEQ ID NO: 36316 - protein, 5 aa, Artificial Sequence
  Description of Artificial Sequence: Synthetic peptide
  XENP022993 vhCDR1
SYTMH

SEQ ID NO: 36317 - protein, 17 aa, Artificial Sequence
  Description of Artificial Sequence: Synthetic peptide
  XENP022993 vhCDR2
FISYDGNYKYYADSVKG

SEQ ID NO: 36318 - protein, 9 aa, Artificial Sequence
  Description of Artificial Sequence: Synthetic peptide
  XENP022993 vhCDR3
GGHLGPFDL

SEQ ID NO: 36319 - protein, 12 aa, Artificial Sequence
  Description of Artificial Sequence: Synthetic peptide
  XENP022993 vlCDR1
RASQSVGSSYLA

SEQ ID NO: 36320 - protein, 7 aa, Artificial Sequence
  Description of Artificial Sequence: Synthetic peptide
  XENP022993 vlCDR2
GASSRAT

SEQ ID NO: 36321 - protein, 9 aa, Artificial Sequence
  Description of Artificial Sequence: Synthetic peptide
  XENP022993 vlCDR3
QQYGSSPWT

SEQ ID NO: 36322 - protein, 219 aa, Artificial Sequence; identical to SEQ ID NO: 33018
  Description of Artificial Sequence: Synthetic polypeptide
  XENP022993 1C11_H3L1_Fab-[CTLA-4]_H3.23_L0.129_scFv Light Chain

SEQ ID NO: 36323 - protein, 112 aa, Artificial Sequence; identical to SEQ ID NO: 33019
  Description of Artificial Sequence: Synthetic polypeptide
  VL of XENP022993

SEQ ID NO: 36324 - protein, 16 aa, Artificial Sequence
  Description of Artificial Sequence: Synthetic peptide
  XENP022993 vlCDR1
RSSQSIVHSNGNTYLE

SEQ ID NO: 36325 - protein, 7 aa, Artificial Sequence
  Description of Artificial Sequence: Synthetic peptide
  XENP022993 vlCDR2
KVSNRFS

SEQ ID NO: 36326 - protein, 9 aa, Artificial Sequence
  Description of Artificial Sequence: Synthetic peptide
  XENP022993 vlCDR3
FQGSHVPNT

SEQ ID NO: 36327 - protein, 446 aa, Artificial Sequence; identical to SEQ ID NO: 36227
  Description of Artificial Sequence: Synthetic polypeptide
  XENP022994 1C11_H3L2_Fab-[CTLA-4]_H3.23_L0.129_scFv Fab-Fc Heavy Chain

SEQ ID NO: 36328 - protein, 117 aa, Artificial Sequence; identical to SEQ ID NO: 33034
  Description of Artificial Sequence: Synthetic polypeptide
  VH of XENP022994

SEQ ID NO: 36329 - protein, 5 aa, Artificial Sequence
  Description of Artificial Sequence: Synthetic peptide
  XENP022994 vhCDR1
HYGMN

SEQ ID NO: 36330 - protein, 17 aa, Artificial Sequence
  Description of Artificial Sequence: Synthetic peptide
  XENP022994 vhCDR2
WINTYTGEPTYADGFTG

SEQ ID NO: 36331 - protein, 8 aa, Artificial Sequence
  Description of Artificial Sequence: Synthetic peptide
  XENP022994 vhCDR3
DYYGSSPY

SEQ ID NO: 36332 - protein, 477 aa, Artificial Sequence; identical to SEQ ID NO: 21669
  Description of Artificial Sequence: Synthetic polypeptide
  XENP022994 1C11_H3L2_Fab-[CTLA-4]_H3.23_L0.129_scFv scFv-Fc Heavy Chain

SEQ ID NO: 36333 - protein, 118 aa, Artificial Sequence; identical to SEQ ID NO: 2632
  Description of Artificial Sequence: Synthetic polypeptide
  VH of XENP022994

SEQ ID NO: 36334 - protein, 108 aa, Artificial Sequence; identical to SEQ ID NO: 2768
  Description of Artificial Sequence: Synthetic polypeptide
  VL of XENP022994

SEQ ID NO: 36335 - protein, 231 aa, Artificial Sequence; identical to SEQ ID NO: 21532
  Description of Artificial Sequence: Synthetic polypeptide
  Fc chain of XENP022994

SEQ ID NO: 36336 - protein, 5 aa, Artificial Sequence
  Description of Artificial Sequence: Synthetic peptide
  XENP022994 vhCDR1
SYTMH

SEQ ID NO: 36337 - protein, 17 aa, Artificial Sequence
  Description of Artificial Sequence: Synthetic peptide
  XENP022994 vhCDR2
FISYDGNYKYYADSVKG

SEQ ID NO: 36338 - protein, 9 aa, Artificial Sequence
  Description of Artificial Sequence: Synthetic peptide
  XENP022994 vhCDR3
GGHLGPFDL

SEQ ID NO: 36339 - protein, 12 aa, Artificial Sequence
  Description of Artificial Sequence: Synthetic peptide
  XENP022994 vlCDR1
RASQSVGSSYLA

SEQ ID NO: 36340 - protein, 7 aa, Artificial Sequence
  Description of Artificial Sequence: Synthetic peptide
  XENP022994 vlCDR2
GASSRAT

SEQ ID NO: 36341 - protein, 9 aa, Artificial Sequence
  Description of Artificial Sequence: Synthetic peptide
  XENP022994 vlCDR3
QQYGSSPWT

SEQ ID NO: 36342 - protein, 219 aa, Artificial Sequence; identical to SEQ ID NO: 33028
  Description of Artificial Sequence: Synthetic polypeptide
  XENP022994 1C11_H3L2_Fab-[CTLA-4]_H3.23_L0.129_scFv Light Chain

SEQ ID NO: 36343 - protein, 112 aa, Artificial Sequence; identical to SEQ ID NO: 33029
  Description of Artificial Sequence: Synthetic polypeptide
  VL of XENP022994

SEQ ID NO: 36344 - protein, 16 aa, Artificial Sequence
  Description of Artificial Sequence: Synthetic peptide
  XENP022994 vlCDR1
RSSQSIVHSNGNTYLE

SEQ ID NO: 36345 - protein, 7 aa, Artificial Sequence
  Description of Artificial Sequence: Synthetic peptide
  XENP022994 vlCDR2
KVSNRFS

SEQ ID NO: 36346 - protein, 9 aa, Artificial Sequence
  Description of Artificial Sequence: Synthetic peptide
  XENP022994 vlCDR3
FQGSHVPNT

SEQ ID NO: 36347 - protein, 446 aa, Artificial Sequence
  Description of Artificial Sequence: Synthetic polypeptide
  XENP020850 1D12_H1L1_IgG1_PVA_/S267K Heavy Chain
QVQLVQSGAEVKKPGASVKVSCKASGYTFTSYTMHWVRQAPGQGLEWMGYLIPSSGYTDYNQKFQGRVTMTADKSTSTAYMELSSLRSEDTAVYYCARGDSVYFDYWGQGTLVTVSSASTKGPSVFPLAPSSKSTSGGTAALGCLVKDYFPEPVTVSWNSGALTSGVHTFPAVLQSSGLYSLSSVVTVPSSSLGTQTYICNVNHKPSNTKVDKKVEPKSCDKTHTCPPCPAPPVAGPSVFLFPPKPKDTLMISRTPEVTCVVVDVKHEDPEVKFNWYVDGVEVHNAKTKPREEQYNSTYRVVSVLTVLHQDWLNGKEYKCKVSNKALPAPIEKTISKAKGQPREPQVYTLPPSREEMTKNQVSLTCLVKGFYPSDIAVEWESNGQPENNYKTTPPVLDSDGSFFLYSKLTVDKSRWQQGNVFSCSVMHEALHNHYTQKSLSLSPGK

SEQ ID NO: 36348 - protein, 117 aa, Artificial Sequence
  Description of Artificial Sequence: Synthetic polypeptide
  VH of XENP020850
QVQLVQSGAEVKKPGASVKVSCKASGYTFTSYTMHWVRQAPGQGLEWMGYLIPSSGYTDYNQKFQGRVTMTADKSTSTAYMELSSLRSEDTAVYYCARGDSVYFDYWGQGTLVTVSS

SEQ ID NO: 36349 - protein, 5 aa, Artificial Sequence
  Description of Artificial Sequence: Synthetic peptide
  XENP020850 vhCDR1
SYTMH

SEQ ID NO: 36350 - protein, 17 aa, Artificial Sequence
  Description of Artificial Sequence: Synthetic peptide
  XENP020850 vhCDR2
YLIPSSGYTDYNQKFQG

SEQ ID NO: 36351 - protein, 8 aa, Artificial Sequence
  Description of Artificial Sequence: Synthetic peptide
  XENP020850 vhCDR3
GDSVYFDY

SEQ ID NO: 36352 - protein, 218 aa, Artificial Sequence
  Description of Artificial Sequence: Synthetic polypeptide
  XENP020850 1D12_H1L1_IgG1_PVA_/S267K Light Chain
DIVLTQSPATLSLSPGERATLSCRASESVEYYGTSLMQWYQQKPGQPPRLLIYAASNVESGVPARFSGSGSGTDFTLTISSLEPEDFAVYFCQQSRKVPWTFGGGTKVEIKRTVAAPSVFIFPPSDEQLKSGTASVVCLLNNFYPREAKVQWKVDNALQSGNSQESVTEQDSKDSTYSLSSTLTLSKADYEKHKVYACEVTHQGLSSPVTKSFNRGEC

SEQ ID NO: 36353 - protein, 111 aa, Artificial Sequence
  Description of Artificial Sequence: Synthetic polypeptide
  VL of XENP020850
DIVLTQSPATLSLSPGERATLSCRASESVEYYGTSLMQWYQQKPGQPPRLLIYAASNVESGVPARFSGSGSGTDFTLTISSLEPEDFAVYFCQQSRKVPWTFGGGTKVEIK

SEQ ID NO: 36354 - protein, 15 aa, Artificial Sequence
  Description of Artificial Sequence: Synthetic peptide
  XENP020850 vlCDR1
RASESVEYYGTSLMQ

SEQ ID NO: 36355 - protein, 7 aa, Artificial Sequence
  Description of Artificial Sequence: Synthetic peptide
  XENP020850 vlCDR2
AASNVES

SEQ ID NO: 36356 - protein, 9 aa, Artificial Sequence
  Description of Artificial Sequence: Synthetic peptide
  XENP020850 vlCDR3
QQSRKVPWT

SEQ ID NO: 36357 - protein, 446 aa, Artificial Sequence; identical to SEQ ID NO: 36347
  Description of Artificial Sequence: Synthetic polypeptide
  XENP020851 1D12_H1L2_IgG1_PVA_/S267K Heavy Chain

SEQ ID NO: 36358 - protein, 117 aa, Artificial Sequence; identical to SEQ ID NO: 36348
  Description of Artificial Sequence: Synthetic polypeptide
  VH of XENP020851

SEQ ID NO: 36359 - protein, 5 aa, Artificial Sequence
  Description of Artificial Sequence: Synthetic peptide
  XENP020851 vhCDR1
SYTMH

SEQ ID NO: 36360 - protein, 17 aa, Artificial Sequence
  Description of Artificial Sequence: Synthetic peptide
  XENP020851 vhCDR2
YLIPSSGYTDYNQKFQG

SEQ ID NO: 36361 - protein, 8 aa, Artificial Sequence
  Description of Artificial Sequence: Synthetic peptide
  XENP020851 vhCDR3
GDSVYFDY

SEQ ID NO: 36362 - protein, 218 aa, Artificial Sequence
  Description of Artificial Sequence: Synthetic polypeptide
  XENP020851 1D12_H1L2_IgG1_PVA_/S267K Light Chain
DIVLTQSPDSLAVSLGERATINCKASESVEYYGTSLMQWYQQKPGQPPKLLIYAASNVESGVPARFSGSGSGTDFTLTISSLQAEDVAVYFCQQSRKVPWTFGGGTKVEIKRTVAAPSVFIFPPSDEQLKSGTASVVCLLNNFYPREAKVQWKVDNALQSGNSQESVTEQDSKDSTYSLSSTLTLSKADYEKHKVYACEVTHQGLSSPVTKSFNRGEC

SEQ ID NO: 36363 - protein, 111 aa, Artificial Sequence
  Description of Artificial Sequence: Synthetic polypeptide
  VL of XENP020851
DIVLTQSPDSLAVSLGERATINCKASESVEYYGTSLMQWYQQKPGQPPKLLIYAASNVESGVPARFSGSGSGTDFTLTISSLQAEDVAVYFCQQSRKVPWTFGGGTKVEIK

SEQ ID NO: 36364 - protein, 15 aa, Artificial Sequence
  Description of Artificial Sequence: Synthetic peptide
  XENP020851 vlCDR1
KASESVEYYGTSLMQ

SEQ ID NO: 36365 - protein, 7 aa, Artificial Sequence
  Description of Artificial Sequence: Synthetic peptide
  XENP020851 vlCDR2
AASNVES

SEQ ID NO: 36366 - protein, 9 aa, Artificial Sequence
  Description of Artificial Sequence: Synthetic peptide
  XENP020851 vlCDR3
QQSRKVPWT

SEQ ID NO: 36367 - protein, 446 aa, Artificial Sequence
  Description of Artificial Sequence: Synthetic polypeptide
  XENP020853 3H3_H1L1_IgG1_PVA_/S267K Heavy Chain
QVTLKESGPVLVKPTETLTLTCTVSGFSLNGYGVNWVRQPPGKGLEWLAMIWGDGSTDYNSALKSRLTISKDNSKSQVVLTMTNMDPVDTATYYCARSYYTSDEDYWGQGTLVTVSSASTKGPSVFPLAPSSKSTSGGTAALGCLVKDYFPEPVTVSWNSGALTSGVHTFPAVLQSSGLYSLSSVVTVPSSSLGTQTYICNVNHKPSNTKVDKKVEPKSCDKTHTCPPCPAPPVAGPSVFLFPPKPKDTLMISRTPEVTCVVVDVKHEDPEVKFNWYVDGVEVHNAKTKPREEQYNSTYRVVSVLTVLHQDWLNGKEYKCKVSNKALPAPIEKTISKAKGQPREPQVYTLPPSREEMTKNQVSLTCLVKGFYPSDIAVEWESNGQPENNYKTTPPVLDSDGSFFLYSKLTVDKSRWQQGNVFSCSVMHEALHNHYTQKSLSLSPGK

SEQ ID NO: 36368 - protein, 117 aa, Artificial Sequence
  Description of Artificial Sequence: Synthetic polypeptide
  VH of XENP020853
QVTLKESGPVLVKPTETLTLTCTVSGFSLNGYGVNWVRQPPGKGLEWLAMIWGDGSTDYNSALKSRLTISKDNSKSQVVLTMTNMDPVDTATYYCARSYYTSDEDYWGQGTLVTVSS

SEQ ID NO: 36369 - protein, 5 aa, Artificial Sequence
  Description of Artificial Sequence: Synthetic peptide
  XENP020853 vhCDR1
GYGVN

SEQ ID NO: 36370 - protein, 16 aa, Artificial Sequence
  Description of Artificial Sequence: Synthetic peptide
  XENP020853 vhCDR2
MIWGDGSTDYNSALKS

SEQ ID NO: 36371 - protein, 9 aa, Artificial Sequence
  Description of Artificial Sequence: Synthetic peptide
  XENP020853 vhCDR3
SYYTSDEDY

SEQ ID NO: 36372 - protein, 219 aa, Artificial Sequence
  Description of Artificial Sequence: Synthetic polypeptide
  XENP020853 3H3_H1L1_IgG1_PVA_/S267K Light Chain
DIVLTQTPLSLPVTPGEPASISCRSSQSLLNSRTRKNYLAWYLQKPGQSPQLLIYWASTRESGVPDRFTGSGSGTDFTLKISRVEAEDVGVYYCKQSYSLRTFGGGTKVEIKRTVAAPSVFIFPPSDEQLKSGTASVVCLLNNFYPREAKVQWKVDNALQSGNSQESVTEQDSKDSTYSLSSTLTLSKADYEKHKVYACEVTHQGLSSPVTKSFNRGEC

SEQ ID NO: 36373 - protein, 112 aa, Artificial Sequence
  Description of Artificial Sequence: Synthetic polypeptide
  VL of XENP020853
DIVLTQTPLSLPVTPGEPASISCRSSQSLLNSRTRKNYLAWYLQKPGQSPQLLIYWASTRESGVPDRFTGSGSGTDFTLKISRVEAEDVGVYYCKQSYSLRTFGGGTKVEIK

SEQ ID NO: 36374 - protein, 17 aa, Artificial Sequence
  Description of Artificial Sequence: Synthetic peptide
  XENP020853 vlCDR1
RSSQSLLNSRTRKNYLA

SEQ ID NO: 36375 - protein, 7 aa, Artificial Sequence
  Description of Artificial Sequence: Synthetic peptide
  XENP020853 vlCDR2
WASTRES

SEQ ID NO: 36376 - protein, 8 aa, Artificial Sequence
  Description of Artificial Sequence: Synthetic peptide
  XENP020853 vlCDR3
KQSYSLRT

SEQ ID NO: 36377 - protein, 446 aa, Artificial Sequence; identical to SEQ ID NO: 36367
  Description of Artificial Sequence: Synthetic polypeptide
  XENP020854 3H3_H1L2_IgG1_PVA_/S267K Heavy Chain

SEQ ID NO: 36378 - protein, 117 aa, Artificial Sequence; identical to SEQ ID NO: 36368
  Description of Artificial Sequence: Synthetic polypeptide
  VH of XENP020854

SEQ ID NO: 36379 - protein, 5 aa, Artificial Sequence
  Description of Artificial Sequence: Synthetic peptide
  XENP020854 vhCDR1
GYGVN

SEQ ID NO: 36380 - protein, 16 aa, Artificial Sequence
  Description of Artificial Sequence: Synthetic peptide
  XENP020854 vhCDR2
MIWGDGSTDYNSALKS

SEQ ID NO: 36381 - protein, 9 aa, Artificial Sequence
  Description of Artificial Sequence: Synthetic peptide
  XENP020854 vhCDR3
SYYTSDEDY

SEQ ID NO: 36382 - protein, 219 aa, Artificial Sequence
  Description of Artificial Sequence: Synthetic polypeptide
  XENP020854 3H3_H1L2_IgG1_PVA_/S267K Light Chain
DIVLTQSPDSLAVSLGERATINCKSSQSLLNSRTRKNYLAWYQQKPGQSPKLLIYWASTRESGVPDRFTGSGSGTDFTLTISSLQAEDVAVYYCKQSYSLRTFGGGTKVEIKRTVAAPSVFIFPPSDEQLKSGTASVVCLLNNFYPREAKVQWKVDNALQSGNSQESVTEQDSKDSTYSLSSTLTLSKADYEKHKVYACEVTHQGLSSPVTKSFNRGEC

SEQ ID NO: 36383 - protein, 112 aa, Artificial Sequence
  Description of Artificial Sequence: Synthetic polypeptide
  VL of XENP020854
DIVLTQSPDSLAVSLGERATINCKSSQSLLNSRTRKNYLAWYQQKPGQSPKLLIYWASTRESGVPDRFTGSGSGTDFTLTISSLQAEDVAVYYCKQSYSLRTFGGGTKVEIK

SEQ ID NO: 36384 - protein, 17 aa, Artificial Sequence
  Description of Artificial Sequence: Synthetic peptide
  XENP020854 vlCDR1
KSSQSLLNSRTRKNYLA

SEQ ID NO: 36385 - protein, 7 aa, Artificial Sequence
  Description of Artificial Sequence: Synthetic peptide
  XENP020854 vlCDR2
WASTRES

SEQ ID NO: 36386 - protein, 8 aa, Artificial Sequence
  Description of Artificial Sequence: Synthetic peptide
  XENP020854 vlCDR3
KQSYSLRT

SEQ ID NO: 36387 - protein, 446 aa, Artificial Sequence
  Description of Artificial Sequence: Synthetic polypeptide
  XENP020855 3H3_H2L1_IgG1_PVA_/S267K Heavy Chain
QVTLKESGPVLVKPTETLTLTCTVSGFSLNGYGVNWVRQPPGKGLEWLAMIWGDGSTDYNSALKSRLTISKDNSKSQVVLTMTNMDPVDTATYYCARSYYTSDFDYWGQGTLVTVSSASTKGPSVFPLAPSSKSTSGGTAALGCLVKDYFPEPVTVSWNSGALTSGVHTFPAVLQSSGLYSLSSVVTVPSSSLGTQTYICNVNHKPSNTKVDKKVEPKSCDKTHTCPPCPAPPVAGPSVFLFPPKPKDTLMISRTPEVTCVVVDVKHEDPEVKFNWYVDGVEVHNAKTKPREEQYNSTYRVVSVLTVLHQDWLNGKEYKCKVSNKALPAPIEKTISKAKGQPREPQVYTLPPSREEMTKNQVSLTCLVKGFYPSDIAVEWESNGQPENNYKTTPPVLDSDGSFFLYSKLTVDKSRWQQGNVFSCSVMHEALHNHYTQKSLSLSPGK

SEQ ID NO: 36388 - protein, 117 aa, Artificial Sequence
  Description of Artificial Sequence: Synthetic polypeptide
  VH of XENP020855
QVTLKESGPVLVKPTETLTLTCTVSGFSLNGYGVNWVRQPPGKGLEWLAMIWGDGSTDYNSALKSRLTISKDNSKSQVVLTMTNMDPVDTATYYCARSYYTSDFDYWGQGTLVTVSS

SEQ ID NO: 36389 - protein, 5 aa, Artificial Sequence
  Description of Artificial Sequence: Synthetic peptide
  XENP020855 vhCDR1
GYGVN

SEQ ID NO: 36390 - protein, 16 aa, Artificial Sequence
  Description of Artificial Sequence: Synthetic peptide
  XENP020855 vhCDR2
MIWGDGSTDYNSALKS

SEQ ID NO: 36391 - protein, 9 aa, Artificial Sequence
  Description of Artificial Sequence: Synthetic peptide
  XENP020855 vhCDR3
SYYTSDFDY

SEQ ID NO: 36392 - protein, 219 aa, Artificial Sequence; identical to SEQ ID NO: 36372
  Description of Artificial Sequence: Synthetic polypeptide
  XENP020855 3H3_H2L1_IgG1_PVA_/S267K Light Chain

SEQ ID NO: 36393 - protein, 112 aa, Artificial Sequence; identical to SEQ ID NO: 36373
  Description of Artificial Sequence: Synthetic polypeptide
  VL of XENP020855

SEQ ID NO: 36394 - protein, 17 aa, Artificial Sequence
  Description of Artificial Sequence: Synthetic peptide
  XENP020855 vlCDR1
RSSQSLLNSRTRKNYLA

SEQ ID NO: 36395 - protein, 7 aa, Artificial Sequence
  Description of Artificial Sequence: Synthetic peptide
  XENP020855 vlCDR2
WASTRES

SEQ ID NO: 36396 - protein, 8 aa, Artificial Sequence
  Description of Artificial Sequence: Synthetic peptide
  XENP020855 vlCDR3
KQSYSLRT

SEQ ID NO: 36397 - protein, 446 aa, Artificial Sequence; identical to SEQ ID NO: 36387
  Description of Artificial Sequence: Synthetic polypeptide
  XENP020856 3H3_H2L2_IgG1_PVA_/S267K Heavy Chain

SEQ ID NO: 36398 - protein, 117 aa, Artificial Sequence; identical to SEQ ID NO: 36388
  Description of Artificial Sequence: Synthetic polypeptide
  VH of XENP020856

SEQ ID NO: 36399 - protein, 5 aa, Artificial Sequence
  Description of Artificial Sequence: Synthetic peptide
  XENP020856 vhCDR1
GYGVN

SEQ ID NO: 36400 - protein, 16 aa, Artificial Sequence
  Description of Artificial Sequence: Synthetic peptide
  XENP020856 vhCDR2
MIWGDGSTDYNSALKS

SEQ ID NO: 36401 - protein, 9 aa, Artificial Sequence
  Description of Artificial Sequence: Synthetic peptide
  XENP020856 vhCDR3
SYYTSDFDY

SEQ ID NO: 36402 - protein, 219 aa, Artificial Sequence; identical to SEQ ID NO: 36382
  Description of Artificial Sequence: Synthetic polypeptide
  XENP020856 3H3_H2L2_IgG1_PVA_/S267K Light Chain

SEQ ID NO: 36403 - protein, 112 aa, Artificial Sequence; identical to SEQ ID NO: 36383
  Description of Artificial Sequence: Synthetic polypeptide
  VL of XENP020856

SEQ ID NO: 36404 - protein, 17 aa, Artificial Sequence
  Description of Artificial Sequence: Synthetic peptide
  XENP020856 vlCDR1
KSSQSLLNSRTRKNYLA

SEQ ID NO: 36405 - protein, 7 aa, Artificial Sequence
  Description of Artificial Sequence: Synthetic peptide
  XENP020856 vlCDR2
WASTRES

SEQ ID NO: 36406 - protein, 8 aa, Artificial Sequence
  Description of Artificial Sequence: Synthetic peptide
  XENP020856 vlCDR3
KQSYSLRT

SEQ ID NO: 36407 - protein, 446 aa, Artificial Sequence
  Description of Artificial Sequence: Synthetic polypeptide
  XENP020857 3H3_H3L1_IgG1_PVA_/S267K Heavy Chain
EVQLLESGGGLVQPGGSLRLSCAVSGFSLNGYGVNWVRQAPGKGLEWVSMIWGDGSTDYNSAVKGRFTISKDNSKSTVYLQMNSLRAEDTAVYYCARSYYTSDEDYWGQGTLVTVSSASTKGPSVFPLAPSSKSTSGGTAALGCLVKDYFPEPVTVSWNSGALTSGVHTFPAVLQSSGLYSLSSVVTVPSSSLGTQTYICNVNHKPSNTKVDKKVEPKSCDKTHTCPPCPAPPVAGPSVFLFPPKPKDTLMISRTPEVTCVVVDVKHEDPEVKFNWYVDGVEVHNAKTKPREEQYNSTYRVVSVLTVLHQDWLNGKEYKCKVSNKALPAPIEKTISKAKGQPREPQVYTLPPSREEMTKNQVSLTCLVKGFYPSDIAVEWESNGQPENNYKTTPPVLDSDGSFFLYSKLTVDKSRWQQGNVFSCSVMHEALHNHYTQKSLSLSPGK

SEQ ID NO: 36408 - protein, 117 aa, Artificial Sequence
  Description of Artificial Sequence: Synthetic polypeptide
  VH of XENP020857
EVQLLESGGGLVQPGGSLRLSCAVSGFSLNGYGVNWVRQAPGKGLEWVSMIWGDGSTDYNSAVKGRFTISKDNSKSTVYLQMNSLRAEDTAVYYCARSYYTSDEDYWGQGTLVTVSS

SEQ ID NO: 36409 - protein, 5 aa, Artificial Sequence
  Description of Artificial Sequence: Synthetic peptide
  XENP020857 vhCDR1
GYGVN

SEQ ID NO: 36410 - protein, 16 aa, Artificial Sequence
  Description of Artificial Sequence: Synthetic peptide
  XENP020857 vhCDR2
MIWGDGSTDYNSAVKG

SEQ ID NO: 36411 - protein, 9 aa, Artificial Sequence
  Description of Artificial Sequence: Synthetic peptide
  XENP020857 vhCDR3
SYYTSDEDY

SEQ ID NO: 36412 - protein, 219 aa, Artificial Sequence; identical to SEQ ID NO: 36372
  Description of Artificial Sequence: Synthetic polypeptide
  XENP020857 3H3_H3L1_IgG1_PVA_/S267K Light Chain

SEQ ID NO: 36413 - protein, 112 aa, Artificial Sequence; identical to SEQ ID NO: 36373
  Description of Artificial Sequence: Synthetic polypeptide
  VL of XENP020857

SEQ ID NO: 36414 - protein, 17 aa, Artificial Sequence
  Description of Artificial Sequence: Synthetic peptide
  XENP020857 vlCDR1
RSSQSLLNSRTRKNYLA

SEQ ID NO: 36415 - protein, 7 aa, Artificial Sequence
  Description of Artificial Sequence: Synthetic peptide
  XENP020857 vlCDR2
WASTRES

SEQ ID NO: 36416 - protein, 8 aa, Artificial Sequence
  Description of Artificial Sequence: Synthetic peptide
  XENP020857 vlCDR3
KQSYSLRT

SEQ ID NO: 36417 - protein, 446 aa, Artificial Sequence; identical to SEQ ID NO: 36407
  Description of Artificial Sequence: Synthetic polypeptide
  XENP020858 3H3_H3L2_IgG1_PVA_/S267K Heavy Chain

SEQ ID NO: 36418 - protein, 117 aa, Artificial Sequence; identical to SEQ ID NO: 36408
  Description of Artificial Sequence: Synthetic polypeptide
  VH of XENP020858

SEQ ID NO: 36419 - protein, 5 aa, Artificial Sequence
  Description of Artificial Sequence: Synthetic peptide
  XENP020858 vhCDR1
GYGVN

SEQ ID NO: 36420 - protein, 16 aa, Artificial Sequence
  Description of Artificial Sequence: Synthetic peptide
  XENP020858 vhCDR2
MIWGDGSTDYNSAVKG

SEQ ID NO: 36421 - protein, 9 aa, Artificial Sequence
  Description of Artificial Sequence: Synthetic peptide
  XENP020858 vhCDR3
SYYTSDEDY

SEQ ID NO: 36422 - protein, 219 aa, Artificial Sequence; identical to SEQ ID NO: 36382
  Description of Artificial Sequence: Synthetic polypeptide
  XENP020858 3H3_H3L2_IgG1_PVA_/S267K Light Chain

SEQ ID NO: 36423 - protein, 112 aa, Artificial Sequence; identical to SEQ ID NO: 36383
  Description of Artificial Sequence: Synthetic polypeptide
  VL of XENP020858

SEQ ID NO: 36424 - protein, 17 aa, Artificial Sequence
  Description of Artificial Sequence: Synthetic peptide
  XENP020858 vlCDR1
KSSQSLLNSRTRKNYLA

SEQ ID NO: 36425 - protein, 7 aa, Artificial Sequence
  Description of Artificial Sequence: Synthetic peptide
  XENP020858 vlCDR2
WASTRES

SEQ ID NO: 36426 - protein, 8 aa, Artificial Sequence
  Description of Artificial Sequence: Synthetic peptide
  XENP020858 vlCDR3
KQSYSLRT

SEQ ID NO: 36427 - protein, 446 aa, Artificial Sequence
  Description of Artificial Sequence: Synthetic polypeptide
  XENP020859 3H3_H4L1_IgG1_PVA_/S267K Heavy Chain
QVQLQESGPGLVKPSETLSLTCTVSGFSLNGYGVNWVRQPPGKGLEWIGMIWGDGSTDYNPSLKSRVTISKDNSKSQVSLKLSSVTAADTAVYYCARSYYTSDEDYWGQGTLVTVSSASTKGPSVFPLAPSSKSTSGGTAALGCLVKDYFPEPVTVSWNSGALTSGVHTFPAVLQSSGLYSLSSVVTVPSSSLGTQTYICNVNHKPSNTKVDKKVEPKSCDKTHTCPPCPAPPVAGPSVFLFPPKPKDTLMISRTPEVTCVVVDVKHEDPEVKFNWYVDGVEVHNAKTKPREEQYNSTYRVVSVLTVLHQDWLNGKEYKCKVSNKALPAPIEKTISKAKGQPREPQVYTLPPSREEMTKNQVSLTCLVKGFYPSDIAVEWESNGQPENNYKTTPPVLDSDGSFFLYSKLTVDKSRWQQGNVFSCSVMHEALHNHYTQKSLSLSPGK

SEQ ID NO: 36428 - protein, 117 aa, Artificial Sequence
  Description of Artificial Sequence: Synthetic polypeptide
  VH of XENP020859
QVQLQESGPGLVKPSETLSLTCTVSGFSLNGYGVNWVRQPPGKGLEWIGMIWGDGSTDYNPSLKSRVTISKDNSKSQVSLKLSSVTAADTAVYYCARSYYTSDEDYWGQGTLVTVSS

SEQ ID NO: 36429 - protein, 5 aa, Artificial Sequence
  Description of Artificial Sequence: Synthetic peptide
  XENP020859 vhCDR1
GYGVN

SEQ ID NO: 36430 - protein, 16 aa, Artificial Sequence
  Description of Artificial Sequence: Synthetic peptide
  XENP020859 vhCDR2
MIWGDGSTDYNPSLKS

SEQ ID NO: 36431 - protein, 9 aa, Artificial Sequence
  Description of Artificial Sequence: Synthetic peptide
  XENP020859 vhCDR3
SYYTSDEDY

SEQ ID NO: 36432 - protein, 219 aa, Artificial Sequence; identical to SEQ ID NO: 36372
  Description of Artificial Sequence: Synthetic polypeptide
  XENP020859 3H3_H4L1_IgG1_PVA_/S267K Light Chain

SEQ ID NO: 36433 - protein, 112 aa, Artificial Sequence; identical to SEQ ID NO: 36373
  Description of Artificial Sequence: Synthetic polypeptide
  VL of XENP020859

SEQ ID NO: 36434 - protein, 17 aa, Artificial Sequence
  Description of Artificial Sequence: Synthetic peptide
  XENP020859 vlCDR1
RSSQSLLNSRTRKNYLA

SEQ ID NO: 36435 - protein, 7 aa, Artificial Sequence
  Description of Artificial Sequence: Synthetic peptide
  XENP020859 vlCDR2
WASTRES

SEQ ID NO: 36436 - protein, 8 aa, Artificial Sequence
  Description of Artificial Sequence: Synthetic peptide
  XENP020859 vlCDR3
KQSYSLRT

SEQ ID NO: 36437 - protein, 446 aa, Artificial Sequence; identical to SEQ ID NO: 36427
  Description of Artificial Sequence: Synthetic polypeptide
  XENP020860 3H3_H4L2_IgG1_PVA_/S267K Heavy Chain

SEQ ID NO: 36438 - protein, 117 aa, Artificial Sequence; identical to SEQ ID NO: 36428
  Description of Artificial Sequence: Synthetic polypeptide
  VH of XENP020860

SEQ ID NO: 36439 - protein, 5 aa, Artificial Sequence
  Description of Artificial Sequence: Synthetic peptide
  XENP020860 vhCDR1
GYGVN

SEQ ID NO: 36440 - protein, 16 aa, Artificial Sequence
  Description of Artificial Sequence: Synthetic peptide
  XENP020860 vhCDR2
MIWGDGSTDYNPSLKS

SEQ ID NO: 36441 - protein, 9 aa, Artificial Sequence
  Description of Artificial Sequence: Synthetic peptide
  XENP020860 vhCDR3
SYYTSDEDY

SEQ ID NO: 36442 - protein, 219 aa, Artificial Sequence; identical to SEQ ID NO: 36382
  Description of Artificial Sequence: Synthetic polypeptide
  XENP020860 3H3_H4L2_IgG1_PVA_/S267K Light Chain

SEQ ID NO: 36443 - protein, 112 aa, Artificial Sequence; identical to SEQ ID NO: 36383
  Description of Artificial Sequence: Synthetic polypeptide
  VL of XENP020860

SEQ ID NO: 36444 - protein, 17 aa, Artificial Sequence
  Description of Artificial Sequence: Synthetic peptide
  XENP020860 vlCDR1
KSSQSLLNSRTRKNYLA

SEQ ID NO: 36445 - protein, 7 aa, Artificial Sequence
  Description of Artificial Sequence: Synthetic peptide
  XENP020860 vlCDR2
WASTRES

SEQ ID NO: 36446 - protein, 8 aa, Artificial Sequence
  Description of Artificial Sequence: Synthetic peptide
  XENP020860 vlCDR3
KQSYSLRT

SEQ ID NO: 36447 - protein, 447 aa, Artificial Sequence
  Description of Artificial Sequence: Synthetic polypeptide
  XENP020861 7B11_H1L1_IgG1_PVA_/S267K Heavy Chain
QVQLVQSGAEVKKPGASVKVSCKVSGFSLTSYAVNWVRQAPGQGLEWMGVIWSGGSTDYNAKFQGRVTMTKDNSKSTVYMELSSLRSEDTAVYYCVSLYYRYDGFDYWGQGTLVTVSSASTKGPSVFPLAPSSKSTSGGTAALGCLVKDYFPEPVTVSWNSGALTSGVHTFPAVLQSSGLYSLSSVVTVPSSSLGTQTYICNVNHKPSNTKVDKKVEPKSCDKTHTCPPCPAPPVAGPSVFLFPPKPKDTLMISRTPEVTCVVVDVKHEDPEVKFNWYVDGVEVHNAKTKPREEQYNSTYRVVSVLTVLHQDWLNGKEYKCKVSNKALPAPIEKTISKAKGQPREPQVYTLPPSREEMTKNQVSLTCLVKGFYPSDIAVEWESNGQPENNYKTTPPVLDSDGSFFLYSKLTVDKSRWQQGNVFSCSVMHEALHNHYTQKSLSLSPGK

SEQ ID NO: 36448 - protein, 118 aa, Artificial Sequence
  Description of Artificial Sequence: Synthetic polypeptide
  VH of XENP020861
QVQLVQSGAEVKKPGASVKVSCKVSGFSLTSYAVNWVRQAPGQGLEWMGVIWSGGSTDYNAKFQGRVTMTKDNSKSTVYMELSSLRSEDTAVYYCVSLYYRYDGFDYWGQGTLVTVSS

SEQ ID NO: 36449 - protein, 5 aa, Artificial Sequence
  Description of Artificial Sequence: Synthetic peptide
  XENP020861 vhCDR1
SYAVN

SEQ ID NO: 36450 - protein, 16 aa, Artificial Sequence
  Description of Artificial Sequence: Synthetic peptide
  XENP020861 vhCDR2
VIWSGGSTDYNAKFQG

SEQ ID NO: 36451 - protein, 10 aa, Artificial Sequence
  Description of Artificial Sequence: Synthetic peptide
  XENP020861 vhCDR3
LYYRYDGFDY

SEQ ID NO: 36452 - protein, 214 aa, Artificial Sequence
  Description of Artificial Sequence: Synthetic polypeptide
  XENP020861 7B11_H1L1_IgG1_PVA_/S267K Light Chain
DIVLTQSPSSLSASVGDRVTITCRASQNVGTHVARYQQKPGKSPKALVYSASYRYSGVPDRFTGSGSGTDFTLTISSLQPEDFATYFCQQYNSYPLTFGGGTKVEIKRTVAAPSVFIFPPSDEQLKSGTASVVCLLNNFYPREAKVQWKVDNALQSGNSQESVTEQDSKDSTYSLSSTLTLSKADYEKHKVYACEVTHQGLSSPVTKSFNRGEC

SEQ ID NO: 36453 - protein, 107 aa, Artificial Sequence
  Description of Artificial Sequence: Synthetic polypeptide
  VL of XENP020861
DIVLTQSPSSLSASVGDRVTITCRASQNVGTHVARYQQKPGKSPKALVYSASYRYSGVPDRFTGSGSGTDFTLTISSLQPEDFATYFCQQYNSYPLTFGGGTKVEIK

SEQ ID NO: 36454 - protein, 11 aa, Artificial Sequence
  Description of Artificial Sequence: Synthetic peptide
  XENP020861 vlCDR1
RASQNVGTHVA

SEQ ID NO: 36455 - protein, 7 aa, Artificial Sequence
  Description of Artificial Sequence: Synthetic peptide
  XENP020861 vlCDR2
SASYRYS

SEQ ID NO: 36456 - protein, 9 aa, Artificial Sequence
  Description of Artificial Sequence: Synthetic peptide
  XENP020861 vlCDR3
QQYNSYPLT

SEQ ID NO: 36457 - protein, 447 aa, Artificial Sequence; identical to SEQ ID NO: 36447
  Description of Artificial Sequence: Synthetic polypeptide
  XENP020862 7B11_H1L2_IgG1_PVA_/S267K Heavy Chain

SEQ ID NO: 36458 - protein, 118 aa, Artificial Sequence; identical to SEQ ID NO: 36448
  Description of Artificial Sequence: Synthetic polypeptide
  VH of XENP020862

SEQ ID NO: 36459 - protein, 5 aa, Artificial Sequence
  Description of Artificial Sequence: Synthetic peptide
  XENP020862 vhCDR1
SYAVN

SEQ ID NO: 36460 - protein, 16 aa, Artificial Sequence
  Description of Artificial Sequence: Synthetic peptide
  XENP020862 vhCDR2
VIWSGGSTDYNAKFQG

SEQ ID NO: 36461 - protein, 10 aa, Artificial Sequence
  Description of Artificial Sequence: Synthetic peptide
  XENP020862 vhCDR3
LYYRYDGFDY

SEQ ID NO: 36462 - protein, 214 aa, Artificial Sequence
  Description of Artificial Sequence: Synthetic polypeptide
  XENP020862 7B11_H1L2_IgG1_PVA_/S267K Light Chain
DIVLTQSPDSLAVSLGERATINCKASQNVGTHVARYQQKPGQSPKALVYSASYRYSGVPDRFTGSGSGTDFTLTISSLQAEDVAVYFCQQYNSYPLTFGGGTKVEIKRTVAAPSVFIFPPSDEQLKSGTASVVCLLNNFYPREAKVQWKVDNALQSGNSQESVTEQDSKDSTYSLSSTLTLSKADYEKHKVYACEVTHQGLSSPVTKSFNRGEC

SEQ ID NO: 36463 - protein, 107 aa, Artificial Sequence
  Description of Artificial Sequence: Synthetic polypeptide
  VL of XENP020862
DIVLTQSPDSLAVSLGERATINCKASQNVGTHVARYQQKPGQSPKALVYSASYRYSGVPDRFTGSGSGTDFTLTISSLQAEDVAVYFCQQYNSYPLTFGGGTKVEIK

SEQ ID NO: 36464 - protein, 11 aa, Artificial Sequence
  Description of Artificial Sequence: Synthetic peptide
  XENP020862 vlCDR1
KASQNVGTHVA

SEQ ID NO: 36465 - protein, 7 aa, Artificial Sequence
  Description of Artificial Sequence: Synthetic peptide
  XENP020862 vlCDR2
SASYRYS

SEQ ID NO: 36466 - protein, 9 aa, Artificial Sequence
  Description of Artificial Sequence: Synthetic peptide
  XENP020862 vlCDR3
QQYNSYPLT

SEQ ID NO: 36467 - protein, 447 aa, Artificial Sequence
  Description of Artificial Sequence: Synthetic polypeptide
  XENP020863 7B11_H2L1_IgG1_PVA_/S267K Heavy Chain
EVQLVESGGGLVQPGGSLRLSCAVSGFSLTSYAVNWVRQAPGKGLEWVSVIWSGGSTDYNPSVKGRFTISKDNSKSTVYLQLNSLRAEDTAVYYCVSLYYRYDGFDYWGQGTLVTVSSASTKGPSVFPLAPSSKSTSGGTAALGCLVKDYFPEPVTVSWNSGALTSGVHTFPAVLQSSGLYSLSSVVTVPSSSLGTQTYICNVNHKPSNTKVDKKVEPKSCDKTHTCPPCPAPPVAGPSVFLFPPKPKDTLMISRTPEVTCVVVDVKHEDPEVKFNWYVDGVEVHNAKTKPREEQYNSTYRVVSVLTVLHQDWLNGKEYKCKVSNKALPAPIEKTISKAKGQPREPQVYTLPPSREEMTKNQVSLTCLVKGFYPSDIAVEWESNGQPENNYKTTPPVLDSDGSFFLYSKLTVDKSRWQQGNVFSCSVMHEALHNHYTQKSLSLSPGK

SEQ ID NO: 36468 - protein, 118 aa, Artificial Sequence
  Description of Artificial Sequence: Synthetic polypeptide
  VH of XENP020863
EVQLVESGGGLVQPGGSLRLSCAVSGFSLTSYAVNWVRQAPGKGLEWVSVIWSGGSTDYNPSVKGRFTISKDNSKSTVYLQLNSLRAEDTAVYYCVSLYYRYDGFDYWGQGTLVTVSS

SEQ ID NO: 36469 - protein, 5 aa, Artificial Sequence
  Description of Artificial Sequence: Synthetic peptide
  XENP020863 vhCDR1
SYAVN

SEQ ID NO: 36470 - protein, 16 aa, Artificial Sequence
  Description of Artificial Sequence: Synthetic peptide
  XENP020863 vhCDR2
VIWSGGSTDYNPSVKG

SEQ ID NO: 36471 - protein, 10 aa, Artificial Sequence
  Description of Artificial Sequence: Synthetic peptide
  XENP020863 vhCDR3
LYYRYDGFDY

SEQ ID NO: 36472 - protein, 214 aa, Artificial Sequence; identical to SEQ ID NO: 36452
  Description of Artificial Sequence: Synthetic polypeptide
  XENP020863 7B11_H2L1_IgG1_PVA_/S267K Light Chain

SEQ ID NO: 36473 - protein, 107 aa, Artificial Sequence; identical to SEQ ID NO: 36453
  Description of Artificial Sequence: Synthetic polypeptide
  VL of XENP020863

SEQ ID NO: 36474 - protein, 11 aa, Artificial Sequence
  Description of Artificial Sequence: Synthetic peptide
  XENP020863 vlCDR1
RASQNVGTHVA

SEQ ID NO: 36475 - protein, 7 aa, Artificial Sequence
  Description of Artificial Sequence: Synthetic peptide
  XENP020863 vlCDR2
SASYRYS

SEQ ID NO: 36476 - protein, 9 aa, Artificial Sequence
  Description of Artificial Sequence: Synthetic peptide
  XENP020863 vlCDR3
QQYNSYPLT

SEQ ID NO: 36477 - protein, 447 aa, Artificial Sequence; identical to SEQ ID NO: 36467
  Description of Artificial Sequence: Synthetic polypeptide
  XENP020864 7B11_H2L2_IgG1_PVA_/S267K Heavy Chain

SEQ ID NO: 36478 - protein, 118 aa, Artificial Sequence; identical to SEQ ID NO: 36468
  Description of Artificial Sequence: Synthetic polypeptide
  VH of XENP020864

SEQ ID NO: 36479 - protein, 5 aa, Artificial Sequence
  Description of Artificial Sequence: Synthetic peptide
  XENP020864 vhCDR1
SYAVN

SEQ ID NO: 36480 - protein, 16 aa, Artificial Sequence
  Description of Artificial Sequence: Synthetic peptide
  XENP020864 vhCDR2
VIWSGGSTDYNPSVKG

SEQ ID NO: 36481 - protein, 10 aa, Artificial Sequence
  Description of Artificial Sequence: Synthetic peptide
  XENP020864 vhCDR3
LYYRYDGFDY

SEQ ID NO: 36482 - protein, 214 aa, Artificial Sequence; identical to SEQ ID NO: 36462
  Description of Artificial Sequence: Synthetic polypeptide
  XENP020864 7B11_H2L2_IgG1_PVA_/S267K Light Chain

SEQ ID NO: 36483 - protein, 107 aa, Artificial Sequence; identical to SEQ ID NO: 36463
  Description of Artificial Sequence: Synthetic polypeptide
  VL of XENP020864

SEQ ID NO: 36484 - protein, 11 aa, Artificial Sequence
  Description of Artificial Sequence: Synthetic peptide
  XENP020864 vlCDR1
KASQNVGTHVA

SEQ ID NO: 36485 - protein, 7 aa, Artificial Sequence
  Description of Artificial Sequence: Synthetic peptide
  XENP020864 vlCDR2
SASYRYS

SEQ ID NO: 36486 - protein, 9 aa, Artificial Sequence
  Description of Artificial Sequence: Synthetic peptide
  XENP020864 vlCDR3
QQYNSYPLT

SEQ ID NO: 36487 - protein, 446 aa, Artificial Sequence
  Description of Artificial Sequence: Synthetic polypeptide
  XENP020865 7C2_H1L1_IgG1_PVA_/S267K Heavy Chain
EVQVLESGGGLVQPGGSLRLSCAASGFTFSRYAVSWVRQAPGKRLEWVSSISSGGSTYYPDSVKGRFTISRDNSKNTLYLQLNSLRAEDTAVYYCARGDYEGYFDYWGQGTLVTVSSASTKGPSVFPLAPSSKSTSGGTAALGCLVKDYFPEPVTVSWNSGALTSGVHTFPAVLQSSGLYSLSSVVTVPSSSLGTQTYICNVNHKPSNTKVDKKVEPKSCDKTHTCPPCPAPPVAGPSVFLFPPKPKDTLMISRTPEVTCVVVDVKHEDPEVKFNWYVDGVEVHNAKTKPREEQYNSTYRVVSVLTVLHQDWLNGKEYKCKVSNKALPAPIEKTISKAKGQPREPQVYTLPPSREEMTKNQVSLTCLVKGFYPSDIAVEWESNGQPENNYKTTPPVLDSDGSFFLYSKLTVDKSRWQQGNVFSCSVMHEALHNHYTQKSLSLSPGK

SEQ ID NO: 36488 - protein, 117 aa, Artificial Sequence
  Description of Artificial Sequence: Synthetic polypeptide
  VH of XENP020865
EVQVLESGGGLVQPGGSLRLSCAASGFTFSRYAVSWVRQAPGKRLEWVSSISSGGSTYYPDSVKGRFTISRDNSKNTLYLQLNSLRAEDTAVYYCARGDYEGYFDYWGQGTLVTVSS

SEQ ID NO: 36489 - protein, 5 aa, Artificial Sequence
  Description of Artificial Sequence: Synthetic peptide
  XENP020865 vhCDR1
RYAVS

SEQ ID NO: 36490 - protein, 16 aa, Artificial Sequence
  Description of Artificial Sequence: Synthetic peptide
  XENP020865 vhCDR2
SISSGGSTYYPDSVKG

SEQ ID NO: 36491 - protein, 9 aa, Artificial Sequence
  Description of Artificial Sequence: Synthetic peptide
  XENP020865 vhCDR3
GDYEGYFDY

SEQ ID NO: 36492 - protein, 220 aa, Artificial Sequence
  Description of Artificial Sequence: Synthetic polypeptide
  XENP020865 7C2_H1L1_IgG1_PVA_/S267K Light Chain
DIVLTQSPDSLAVSLGERATINCKSSQSLLNSINQKNYLAGYQQKPGQSPKLLVYFASTRESGVPDRFIGSGSGTDFTLTISSLQAEDVAVYFCQQHYSTPLTFGAGTKLEIKRTVAAPSVFIFPPSDEQLKSGTASVVCLLNNFYPREAKVQWKVDNALQSGNSQESVTEQDSKDSTYSLSSTLTLSKADYEKHKVYACEVTHQGLSSPVTKSFNRGEC

SEQ ID NO: 36493 - protein, 113 aa, Artificial Sequence
  Description of Artificial Sequence: Synthetic polypeptide
  VL of XENP020865
DIVLTQSPDSLAVSLGERATINCKSSQSLLNSINQKNYLAGYQQKPGQSPKLLVYFASTRESGVPDRFIGSGSGTDFTLTISSLQAEDVAVYFCQQHYSTPLTFGAGTKLEIK

SEQ ID NO: 36494 - protein, 17 aa, Artificial Sequence
  Description of Artificial Sequence: Synthetic peptide
  XENP020865 vlCDR1
KSSQSLLNSINQKNYLA

SEQ ID NO: 36495 - protein, 7 aa, Artificial Sequence
  Description of Artificial Sequence: Synthetic peptide
  XENP020865 vlCDR2
FASTRES

SEQ ID NO: 36496 - protein, 9 aa, Artificial Sequence
  Description of Artificial Sequence: Synthetic peptide
  XENP020865 vlCDR3
QQHYSTPLT

SEQ ID NO: 36497 - protein, 446 aa, Artificial Sequence; identical to SEQ ID NO: 36367
  Description of Artificial Sequence: Synthetic polypeptide
  XENP021188 3H3_H1_L1.1_IgG1_PVA_/S267K Heavy Chain

SEQ ID NO: 36498 - protein, 117 aa, Artificial Sequence; identical to SEQ ID NO: 36368
  Description of Artificial Sequence: Synthetic polypeptide
  VH of XENP021188

SEQ ID NO: 36499 - protein, 5 aa, Artificial Sequence
  Description of Artificial Sequence: Synthetic peptide
  XENP021188 vhCDR1
GYGVN

SEQ ID NO: 36500 - protein, 16 aa, Artificial Sequence
  Description of Artificial Sequence: Synthetic peptide
  XENP021188 vhCDR2
MIWGDGSTDYNSALKS

SEQ ID NO: 36501 - protein, 9 aa, Artificial Sequence
  Description of Artificial Sequence: Synthetic peptide
  XENP021188 vhCDR3
SYYTSDEDY

SEQ ID NO: 36502 - protein, 219 aa, Artificial Sequence
  Description of Artificial Sequence: Synthetic polypeptide
  XENP021188 3H3_H1_L1.1_IgG1_PVA_/S267K Light Chain
DIVMTQTPLSLPVTPGEPASISCRSSQSLLNSRTRKNYLAWYLQKPGQSPQLLIYWASTRESGVPDRFTGSGSGTDFTLKISRVEAEDVGVYYCKQSYSLRTFGGGTKVEIKRTVAAPSVFIFPPSDEQLKSGTASVVCLLNNFYPREAKVQWKVDNALQSGNSQESVTEQDSKDSTYSLSSTLTLSKADYEKHKVYACEVTHQGLSSPVTKSFNRGEC

SEQ ID NO: 36503 - protein, 112 aa, Artificial Sequence
  Description of Artificial Sequence: Synthetic polypeptide
  VL of XENP021188
DIVMTQTPLSLPVTPGEPASISCRSSQSLLNSRTRKNYLAWYLQKPGQSPQLLIYWASTRESGVPDRFTGSGSGTDFTLKISRVEAEDVGVYYCKQSYSLRTFGGGTKVEIK

SEQ ID NO: 36504 - protein, 17 aa, Artificial Sequence
  Description of Artificial Sequence: Synthetic peptide
  XENP021188 vlCDR1
RSSQSLLNSRTRKNYLA

SEQ ID NO: 36505 - protein, 7 aa, Artificial Sequence
  Description of Artificial Sequence: Synthetic peptide
  XENP021188 vlCDR2
WASTRES

SEQ ID NO: 36506 - protein, 8 aa, Artificial Sequence
  Description of Artificial Sequence: Synthetic peptide
  XENP021188 vlCDR3
KQSYSLRT

SEQ ID NO: 36507 - protein, 446 aa, Artificial Sequence; identical to SEQ ID NO: 36367
  Description of Artificial Sequence: Synthetic polypeptide
  XENP021189 3H3_H1_L2.1_IgG1_PVA_/S267K Heavy Chain

SEQ ID NO: 36508 - protein, 117 aa, Artificial Sequence; identical to SEQ ID NO: 36368
  Description of Artificial Sequence: Synthetic polypeptide
  VH of XENP021189

SEQ ID NO: 36509 - protein, 5 aa, Artificial Sequence
  Description of Artificial Sequence: Synthetic peptide
  XENP021189 vhCDR1
GYGVN

SEQ ID NO: 36510 - protein, 16 aa, Artificial Sequence
  Description of Artificial Sequence: Synthetic peptide
  XENP021189 vhCDR2
MIWGDGSTDYNSALKS

SEQ ID NO: 36511 - protein, 9 aa, Artificial Sequence
  Description of Artificial Sequence: Synthetic peptide
  XENP021189 vhCDR3
SYYTSDEDY

SEQ ID NO: 36512 - protein, 219 aa, Artificial Sequence
  Description of Artificial Sequence: Synthetic polypeptide
  XENP021189 3H3_H1_L2.1_IgG1_PVA_/S267K Light Chain
DIVMTQSPDSLAVSLGERATINCKSSQSLLNSRTRKNYLAWYQQKPGQSPKLLIYWASTRESGVPDRFTGSGSGTDFTLTISSLQAEDVAVYYCKQSYSLRTFGGGTKVEIKRTVAAPSVFIFPPSDEQLKSGTASVVCLLNNFYPREAKVQWKVDNALQSGNSQESVTEQDSKDSTYSLSSTLTLSKADYEKHKVYACEVTHQGLSSPVTKSFNRGEC

SEQ ID NO: 36513 - protein, 112 aa, Artificial Sequence
  Description of Artificial Sequence: Synthetic polypeptide
  VL of XENP021189
DIVMTQSPDSLAVSLGERATINCKSSQSLLNSRTRKNYLAWYQQKPGQSPKLLIYWASTRESGVPDRFTGSGSGTDFTLTISSLQAEDVAVYYCKQSYSLRTFGGGTKVEIK

SEQ ID NO: 36514 - protein, 17 aa, Artificial Sequence
  Description of Artificial Sequence: Synthetic peptide
  XENP021189 vlCDR1
KSSQSLLNSRTRKNYLA

SEQ ID NO: 36515 - protein, 7 aa, Artificial Sequence
  Description of Artificial Sequence: Synthetic peptide
  XENP021189 vlCDR2
WASTRES

SEQ ID NO: 36516 - protein, 8 aa, Artificial Sequence
  Description of Artificial Sequence: Synthetic peptide
  XENP021189 vlCDR3
KQSYSLRT

SEQ ID NO: 36517 - protein, 446 aa, Artificial Sequence; identical to SEQ ID NO: 36387
  Description of Artificial Sequence: Synthetic polypeptide
  XENP021190 3H3_H2_L1.1_IgG1_PVA_/S267K Heavy Chain

SEQ ID NO: 36518 - protein, 117 aa, Artificial Sequence; identical to SEQ ID NO: 36388
  Description of Artificial Sequence: Synthetic polypeptide
  VH of XENP021190

SEQ ID NO: 36519 - protein, 5 aa, Artificial Sequence
  Description of Artificial Sequence: Synthetic peptide
  XENP021190 vhCDR1
GYGVN

SEQ ID NO: 36520 - protein, 16 aa, Artificial Sequence
  Description of Artificial Sequence: Synthetic peptide
  XENP021190 vhCDR2
MIWGDGSTDYNSALKS

SEQ ID NO: 36521 - protein, 9 aa, Artificial Sequence
  Description of Artificial Sequence: Synthetic peptide
  XENP021190 vhCDR3
SYYTSDFDY

SEQ ID NO: 36522 - protein, 219 aa, Artificial Sequence; identical to SEQ ID NO: 36502
  Description of Artificial Sequence: Synthetic polypeptide
  XENP021190 3H3_H2_L1.1_IgG1_PVA_/S267K Light Chain

SEQ ID NO: 36523 - protein, 112 aa, Artificial Sequence; identical to SEQ ID NO: 36503
  Description of Artificial Sequence: Synthetic polypeptide
  VL of XENP021190

SEQ ID NO: 36524 - protein, 17 aa, Artificial Sequence
  Description of Artificial Sequence: Synthetic peptide
  XENP021190 vlCDR1
RSSQSLLNSRTRKNYLA

SEQ ID NO: 36525 - protein, 7 aa, Artificial Sequence
  Description of Artificial Sequence: Synthetic peptide
  XENP021190 vlCDR2
WASTRES

SEQ ID NO: 36526 - protein, 8 aa, Artificial Sequence
  Description of Artificial Sequence: Synthetic peptide
  XENP021190 vlCDR3
KQSYSLRT

SEQ ID NO: 36527 - protein, 446 aa, Artificial Sequence; identical to SEQ ID NO: 36387
  Description of Artificial Sequence: Synthetic polypeptide
  XENP021191 3H3_H2_L2.1_IgG1_PVA_/S267K Heavy Chain

SEQ ID NO: 36528 - protein, 117 aa, Artificial Sequence; identical to SEQ ID NO: 36388
  Description of Artificial Sequence: Synthetic polypeptide
  VH of XENP021191

SEQ ID NO: 36529 - protein, 5 aa, Artificial Sequence
  Description of Artificial Sequence: Synthetic peptide
  XENP021191 vhCDR1
GYGVN

SEQ ID NO: 36530 - protein, 16 aa, Artificial Sequence
  Description of Artificial Sequence: Synthetic peptide
  XENP021191 vhCDR2
MIWGDGSTDYNSALKS

SEQ ID NO: 36531 - protein, 9 aa, Artificial Sequence
  Description of Artificial Sequence: Synthetic peptide
  XENP021191 vhCDR3
SYYTSDFDY

SEQ ID NO: 36532 - protein, 219 aa, Artificial Sequence; identical to SEQ ID NO: 36512
  Description of Artificial Sequence: Synthetic polypeptide
  XENP021191 3H3_H2_L2.1_IgG1_PVA_/S267K Light Chain

SEQ ID NO: 36533 - protein, 112 aa, Artificial Sequence; identical to SEQ ID NO: 36513
  Description of Artificial Sequence: Synthetic polypeptide
  VL of XENP021191

SEQ ID NO: 36534 - protein, 17 aa, Artificial Sequence
  Description of Artificial Sequence: Synthetic peptide
  XENP021191 vlCDR1
KSSQSLLNSRTRKNYLA

SEQ ID NO: 36535 - protein, 7 aa, Artificial Sequence
  Description of Artificial Sequence: Synthetic peptide
  XENP021191 vlCDR2
WASTRES

SEQ ID NO: 36536 - protein, 8 aa, Artificial Sequence
  Description of Artificial Sequence: Synthetic peptide
  XENP021191 vlCDR3
KQSYSLRT

SEQ ID NO: 36537 - protein, 446 aa, Artificial Sequence; identical to SEQ ID NO: 36407
  Description of Artificial Sequence: Synthetic polypeptide
  XENP021192 3H3_H3_L1.1_IgG1_PVA_/S267K Heavy Chain

SEQ ID NO: 36538 - protein, 117 aa, Artificial Sequence; identical to SEQ ID NO: 36408
  Description of Artificial Sequence: Synthetic polypeptide
  VH of XENP021192

SEQ ID NO: 36539 - protein, 5 aa, Artificial Sequence
  Description of Artificial Sequence: Synthetic peptide
  XENP021192 vhCDR1
GYGVN

SEQ ID NO: 36540 - protein, 16 aa, Artificial Sequence
  Description of Artificial Sequence: Synthetic peptide
  XENP021192 vhCDR2
MIWGDGSTDYNSAVKG

SEQ ID NO: 36541 - protein, 9 aa, Artificial Sequence
  Description of Artificial Sequence: Synthetic peptide
  XENP021192 vhCDR3
SYYTSDEDY

SEQ ID NO: 36542 - protein, 219 aa, Artificial Sequence; identical to SEQ ID NO: 36502
  Description of Artificial Sequence: Synthetic polypeptide
  XENP021192 3H3_H3_L1.1_IgG1_PVA_/S267K Light Chain

SEQ ID NO: 36543 - protein, 112 aa, Artificial Sequence; identical to SEQ ID NO: 36503
  Description of Artificial Sequence: Synthetic polypeptide
  VL of XENP021192

SEQ ID NO: 36544 - protein, 17 aa, Artificial Sequence
  Description of Artificial Sequence: Synthetic peptide
  XENP021192 vlCDR1
RSSQSLLNSRTRKNYLA

SEQ ID NO: 36545 - protein, 7 aa, Artificial Sequence
  Description of Artificial Sequence: Synthetic peptide
  XENP021192 vlCDR2
WASTRES

SEQ ID NO: 36546 - protein, 8 aa, Artificial Sequence
  Description of Artificial Sequence: Synthetic peptide
  XENP021192 vlCDR3
KQSYSLRT

SEQ ID NO: 36547 - protein, 446 aa, Artificial Sequence; identical to SEQ ID NO: 36407
  Description of Artificial Sequence: Synthetic polypeptide
  XENP021193 3H3_H3_L2.1_IgG1_PVA_/S267K Heavy Chain

SEQ ID NO: 36548 - protein, 117 aa, Artificial Sequence; identical to SEQ ID NO: 36408
  Description of Artificial Sequence: Synthetic polypeptide
  VH of XENP021193

SEQ ID NO: 36549 - protein, 5 aa, Artificial Sequence
  Description of Artificial Sequence: Synthetic peptide
  XENP021193 vhCDR1
GYGVN

SEQ ID NO: 36550 - protein, 16 aa, Artificial Sequence
  Description of Artificial Sequence: Synthetic peptide
  XENP021193 vhCDR2
MIWGDGSTDYNSAVKG

SEQ ID NO: 36551 - protein, 9 aa, Artificial Sequence
  Description of Artificial Sequence: Synthetic peptide
  XENP021193 vhCDR3
SYYTSDEDY

SEQ ID NO: 36552 - protein, 219 aa, Artificial Sequence; identical to SEQ ID NO: 36512
  Description of Artificial Sequence: Synthetic polypeptide
  XENP021193 3H3_H3_L2.1_IgG1_PVA_/S267K Light Chain

SEQ ID NO: 36553 - protein, 112 aa, Artificial Sequence; identical to SEQ ID NO: 36513
  Description of Artificial Sequence: Synthetic polypeptide
  VL of XENP021193

SEQ ID NO: 36554 - protein, 17 aa, Artificial Sequence
  Description of Artificial Sequence: Synthetic peptide
  XENP021193 vlCDR1
KSSQSLLNSRTRKNYLA

SEQ ID NO: 36555 - protein, 7 aa, Artificial Sequence
  Description of Artificial Sequence: Synthetic peptide
  XENP021193 vlCDR2
WASTRES

SEQ ID NO: 36556 - protein, 8 aa, Artificial Sequence
  Description of Artificial Sequence: Synthetic peptide
  XENP021193 vlCDR3
KQSYSLRT

SEQ ID NO: 36557 - protein, 446 aa, Artificial Sequence; identical to SEQ ID NO: 36427
  Description of Artificial Sequence: Synthetic polypeptide
  XENP021194 3H3_H4_L1.1_IgG1_PVA_/S267K Heavy Chain

SEQ ID NO: 36558 - protein, 117 aa, Artificial Sequence; identical to SEQ ID NO: 36428
  Description of Artificial Sequence: Synthetic polypeptide
  VH of XENP021194

SEQ ID NO: 36559 - protein, 5 aa, Artificial Sequence
  Description of Artificial Sequence: Synthetic peptide
  XENP021194 vhCDR1
GYGVN

SEQ ID NO: 36560 - protein, 16 aa, Artificial Sequence
  Description of Artificial Sequence: Synthetic peptide
  XENP021194 vhCDR2
MIWGDGSTDYNPSLKS

SEQ ID NO: 36561 - protein, 9 aa, Artificial Sequence
  Description of Artificial Sequence: Synthetic peptide
  XENP021194 vhCDR3
SYYTSDEDY

SEQ ID NO: 36562 - protein, 219 aa, Artificial Sequence; identical to SEQ ID NO: 36502
  Description of Artificial Sequence: Synthetic polypeptide
  XENP021194 3H3_H4_L1.1_IgG1_PVA_/S267K Light Chain

SEQ ID NO: 36563 - protein, 112 aa, Artificial Sequence; identical to SEQ ID NO: 36503
  Description of Artificial Sequence: Synthetic polypeptide
  VL of XENP021194

SEQ ID NO: 36564 - protein, 17 aa, Artificial Sequence
  Description of Artificial Sequence: Synthetic peptide
  XENP021194 vlCDR1
RSSQSLLNSRTRKNYLA

SEQ ID NO: 36565 - protein, 7 aa, Artificial Sequence
  Description of Artificial Sequence: Synthetic peptide
  XENP021194 vlCDR2
WASTRES

SEQ ID NO: 36566 - protein, 8 aa, Artificial Sequence
  Description of Artificial Sequence: Synthetic peptide
  XENP021194 vlCDR3
KQSYSLRT

SEQ ID NO: 36567 - protein, 446 aa, Artificial Sequence; identical to SEQ ID NO: 36427
  Description of Artificial Sequence: Synthetic polypeptide
  XENP021195 3H3_H4_L2.1_IgG1_PVA_/S267K Heavy Chain

SEQ ID NO: 36568 - protein, 117 aa, Artificial Sequence; identical to SEQ ID NO: 36428
  Description of Artificial Sequence: Synthetic polypeptide
  VH of XENP021195

SEQ ID NO: 36569 - protein, 5 aa, Artificial Sequence
  Description of Artificial Sequence: Synthetic peptide
  XENP021195 vhCDR1
GYGVN

SEQ ID NO: 36570 - protein, 16 aa, Artificial Sequence
  Description of Artificial Sequence: Synthetic peptide
  XENP021195 vhCDR2
MIWGDGSTDYNPSLKS

SEQ ID NO: 36571 - protein, 9 aa, Artificial Sequence
  Description of Artificial Sequence: Synthetic peptide
  XENP021195 vhCDR3
SYYTSDEDY

SEQ ID NO: 36572 - protein, 219 aa, Artificial Sequence; identical to SEQ ID NO: 36512
  Description of Artificial Sequence: Synthetic polypeptide
  XENP021195 3H3_H4_L2.1_IgG1_PVA_/S267K Light Chain

SEQ ID NO: 36573 - protein, 112 aa, Artificial Sequence; identical to SEQ ID NO: 36513
  Description of Artificial Sequence: Synthetic polypeptide
  VL of XENP021195

SEQ ID NO: 36574 - protein, 17 aa, Artificial Sequence
  Description of Artificial Sequence: Synthetic peptide
  XENP021195 vlCDR1
KSSQSLLNSRTRKNYLA

SEQ ID NO: 36575 - protein, 7 aa, Artificial Sequence
  Description of Artificial Sequence: Synthetic peptide
  XENP021195 vlCDR2
WASTRES

SEQ ID NO: 36576 - protein, 8 aa, Artificial Sequence
  Description of Artificial Sequence: Synthetic peptide
  XENP021195 vlCDR3
KQSYSLRT

SEQ ID NO: 36577 - protein, 447 aa, Artificial Sequence; identical to SEQ ID NO: 36447
  Description of Artificial Sequence: Synthetic polypeptide
  XENP021196 7B11_H1_L1.1_IgG1_PVA_/S267K Heavy Chain

SEQ ID NO: 36578 - protein, 118 aa, Artificial Sequence; identical to SEQ ID NO: 36448
  Description of Artificial Sequence: Synthetic polypeptide
  VH of XENP021196

SEQ ID NO: 36579 - protein, 5 aa, Artificial Sequence
  Description of Artificial Sequence: Synthetic peptide
  XENP021196 vhCDR1
SYAVN

SEQ ID NO: 36580 - protein, 16 aa, Artificial Sequence
  Description of Artificial Sequence: Synthetic peptide
  XENP021196 vhCDR2
VIWSGGSTDYNAKFQG

SEQ ID NO: 36581 - protein, 10 aa, Artificial Sequence
  Description of Artificial Sequence: Synthetic peptide
  XENP021196 vhCDR3
LYYRYDGFDY

SEQ ID NO: 36582 - protein, 214 aa, Artificial Sequence
  Description of Artificial Sequence: Synthetic polypeptide
  XENP021196 7B11_H1_L1.1_IgG1_PVA_/S267K Light Chain
DIVMTQSPSSLSASVGDRVTITCRASQNVGTHVAWYQQKPGKSPKALVYSASYRYSGVPDRFTGSGSGTDFTLTISSLQPEDFATYFCQQYNSYPLTFGGGTKVEIKRTVAAPSVFIFPPSDEQLKSGTASVVCLLNNFYPREAKVQWKVDNALQSGNSQESVTEQDSKDSTYSLSSTLTLSKADYEKHKVYACEVTHQGLSSPVTKSFNRGEC

SEQ ID NO: 36583 - protein, 107 aa, Artificial Sequence
  Description of Artificial Sequence: Synthetic polypeptide
  VL of XENP021196
DIVMTQSPSSLSASVGDRVTITCRASQNVGTHVAWYQQKPGKSPKALVYSASYRYSGVPDRFTGSGSGTDFTLTISSLQPEDFATYFCQQYNSYPLTFGGGTKVEIK

SEQ ID NO: 36584 - protein, 11 aa, Artificial Sequence
  Description of Artificial Sequence: Synthetic peptide
  XENP021196 vlCDR1
RASQNVGTHVA

SEQ ID NO: 36585 - protein, 7 aa, Artificial Sequence
  Description of Artificial Sequence: Synthetic peptide
  XENP021196 vlCDR2
SASYRYS

SEQ ID NO: 36586 - protein, 9 aa, Artificial Sequence
  Description of Artificial Sequence: Synthetic peptide
  XENP021196 vlCDR3
QQYNSYPLT

SEQ ID NO: 36587 - protein, 447 aa, Artificial Sequence; identical to SEQ ID NO: 36447
  Description of Artificial Sequence: Synthetic polypeptide
  XENP021201 7B11_H1_L2.1_IgG1_PVA_/S267K Heavy Chain

SEQ ID NO: 36588 - protein, 118 aa, Artificial Sequence; identical to SEQ ID NO: 36448
  Description of Artificial Sequence: Synthetic polypeptide
  VH of XENP021201

SEQ ID NO: 36589 - protein, 5 aa, Artificial Sequence
  Description of Artificial Sequence: Synthetic peptide
  XENP021201 vhCDR1
SYAVN

SEQ ID NO: 36590 - protein, 16 aa, Artificial Sequence
  Description of Artificial Sequence: Synthetic peptide
  XENP021201 vhCDR2
VIWSGGSTDYNAKFQG

SEQ ID NO: 36591 - protein, 10 aa, Artificial Sequence
  Description of Artificial Sequence: Synthetic peptide
  XENP021201 vhCDR3
LYYRYDGFDY

SEQ ID NO: 36592 - protein, 214 aa, Artificial Sequence
  Description of Artificial Sequence: Synthetic polypeptide
  XENP021201 7B11_H1_L2.1_IgG1_PVA_/S267K Light Chain
DIVMTQSPDSLAVSLGERATINCKASQNVGTHVAWYQQKPGQSPKALVYSASYRYSGVPDRFTGSGSGTDFTLTISSLQAEDVAVYFCQQYNSYPLTFGGGTKVEIKRTVAAPSVFIFPPSDEQLKSGTASVVCLLNNFYPREAKVQWKVDNALQSGNSQESVTEQDSKDSTYSLSSTLTLSKADYEKHKVYACEVTHQGLSSPVTKSFNRGEC

SEQ ID NO: 36593 - protein, 107 aa, Artificial Sequence
  Description of Artificial Sequence: Synthetic polypeptide
  VL of XENP021201
DIVMTQSPDSLAVSLGERATINCKASQNVGTHVAWYQQKPGQSPKALVYSASYRYSGVPDRFTGSGSGTDFTLTISSLQAEDVAVYFCQQYNSYPLTFGGGTKVEIK

SEQ ID NO: 36594 - protein, 11 aa, Artificial Sequence
  Description of Artificial Sequence: Synthetic peptide
  XENP021201 vlCDR1
KASQNVGTHVA

SEQ ID NO: 36595 - protein, 7 aa, Artificial Sequence
  Description of Artificial Sequence: Synthetic peptide
  XENP021201 vlCDR2
SASYRYS

SEQ ID NO: 36596 - protein, 9 aa, Artificial Sequence
  Description of Artificial Sequence: Synthetic peptide
  XENP021201 vlCDR3
QQYNSYPLT

SEQ ID NO: 36597 - protein, 447 aa, Artificial Sequence
  Description of Artificial Sequence: Synthetic polypeptide
  XENP021202 7B11_H2.1_L1.1_IgG1_PVA_/S267K Heavy Chain
EVQLVESGGGLVQPGGSLRLSCAVSGFSLTSYAVNWVRQAPGKGLEWVSVIWSGGSTDYNPSVKGRFTISKDNSKSTVYLQMNSLRAEDTAVYYCVSLYYRYDGFDYWGQGTLVTVSSASTKGPSVFPLAPSSKSTSGGTAALGCLVKDYFPEPVTVSWNSGALTSGVHTFPAVLQSSGLYSLSSVVTVPSSSLGTQTYICNVNHKPSNTKVDKKVEPKSCDKTHTCPPCPAPPVAGPSVFLFPPKPKDTLMISRTPEVTCVVVDVKHEDPEVKFNWYVDGVEVHNAKTKPREEQYNSTYRVVSVLTVLHQDWLNGKEYKCKVSNKALPAPIEKTISKAKGQPREPQVYTLPPSREEMTKNQVSLTCLVKGFYPSDIAVEWESNGQPENNYKTTPPVLDSDGSFFLYSKLTVDKSRWQQGNVFSCSVMHEALHNHYTQKSLSLSPGK

SEQ ID NO: 36598 - protein, 118 aa, Artificial Sequence
  Description of Artificial Sequence: Synthetic polypeptide
  VH of XENP021202
EVQLVESGGGLVQPGGSLRLSCAVSGFSLTSYAVNWVRQAPGKGLEWVSVIWSGGSTDYNPSVKGRFTISKDNSKSTVYLQMNSLRAEDTAVYYCVSLYYRYDGFDYWGQGTLVTVSS

SEQ ID NO: 36599 - protein, 5 aa, Artificial Sequence
  Description of Artificial Sequence: Synthetic peptide
  XENP021202 vhCDR1
SYAVN

SEQ ID NO: 36600 - protein, 16 aa, Artificial Sequence
  Description of Artificial Sequence: Synthetic peptide
  XENP021202 vhCDR2
VIWSGGSTDYNPSVKG

SEQ ID NO: 36601 - protein, 10 aa, Artificial Sequence
  Description of Artificial Sequence: Synthetic peptide
  XENP021202 vhCDR3
LYYRYDGFDY

SEQ ID NO: 36602 - protein, 214 aa, Artificial Sequence; identical to SEQ ID NO: 36582
  Description of Artificial Sequence: Synthetic polypeptide
  XENP021202 7B11_H2.1_L1.1_IgG1_PVA_/S267K Light Chain

SEQ ID NO: 36603 - protein, 107 aa, Artificial Sequence; identical to SEQ ID NO: 36583
  Description of Artificial Sequence: Synthetic polypeptide
  VL of XENP021202

SEQ ID NO: 36604 - protein, 11 aa, Artificial Sequence
  Description of Artificial Sequence: Synthetic peptide
  XENP021202 vlCDR1
RASQNVGTHVA

SEQ ID NO: 36605 - protein, 7 aa, Artificial Sequence
  Description of Artificial Sequence: Synthetic peptide
  XENP021202 vlCDR2
SASYRYS

SEQ ID NO: 36606 - protein, 9 aa, Artificial Sequence
  Description of Artificial Sequence: Synthetic peptide
  XENP021202 vlCDR3
QQYNSYPLT

SEQ ID NO: 36607 - protein, 447 aa, Artificial Sequence; identical to SEQ ID NO: 36597
  Description of Artificial Sequence: Synthetic polypeptide
  XENP021203 7B11_H2.1_L2.1_IgG1_PVA_/S267K Heavy Chain

SEQ ID NO: 36608 - protein, 118 aa, Artificial Sequence; identical to SEQ ID NO: 36598
  Description of Artificial Sequence: Synthetic polypeptide
  VH of XENP021203

SEQ ID NO: 36609 - protein, 5 aa, Artificial Sequence
  Description of Artificial Sequence: Synthetic peptide
  XENP021203 vhCDR1
SYAVN

SEQ ID NO: 36610 - protein, 16 aa, Artificial Sequence
  Description of Artificial Sequence: Synthetic peptide
  XENP021203 vhCDR2
VIWSGGSTDYNPSVKG

SEQ ID NO: 36611 - protein, 10 aa, Artificial Sequence
  Description of Artificial Sequence: Synthetic peptide
  XENP021203 vhCDR3
LYYRYDGFDY

SEQ ID NO: 36612 - protein, 214 aa, Artificial Sequence; identical to SEQ ID NO: 36592
  Description of Artificial Sequence: Synthetic polypeptide
  XENP021203 7B11_H2.1_L2.1_IgG1_PVA_/S267K Light Chain

SEQ ID NO: 36613 - protein, 107 aa, Artificial Sequence; identical to SEQ ID NO: 36593
  Description of Artificial Sequence: Synthetic polypeptide
  VL of XENP021203

SEQ ID NO: 36614 - protein, 11 aa, Artificial Sequence
  Description of Artificial Sequence: Synthetic peptide
  XENP021203 vlCDR1
KASQNVGTHVA

SEQ ID NO: 36615 - protein, 7 aa, Artificial Sequence
  Description of Artificial Sequence: Synthetic peptide
  XENP021203 vlCDR2
SASYRYS

SEQ ID NO: 36616 - protein, 9 aa, Artificial Sequence
  Description of Artificial Sequence: Synthetic peptide
  XENP021203 vlCDR3
QQYNSYPLT

SEQ ID NO: 36617 - protein, 446 aa, Artificial Sequence
  Description of Artificial Sequence: Synthetic polypeptide
  XENP021204 7C2_H1.1_L1.1_IgG1_PVA_/S267K Heavy Chain
EVQVLESGGGLVQPGGSLRLSCAASGFTFSRYAMSWVRQAPGKRLEWVSSISSGGSTYYPDSVKGRFTISRDNSKNTLYLQMNSLRAEDTAVYYCARGDYEGYFDYWGQGTLVTVSSASTKGPSVFPLAPSSKSTSGGTAALGCLVKDYFPEPVTVSWNSGALTSGVHTFPAVLQSSGLYSLSSVVTVPSSSLGTQTYICNVNHKPSNTKVDKKVEPKSCDKTHTCPPCPAPPVAGPSVFLFPPKPKDTLMISRTPEVTCVVVDVKHEDPEVKFNWYVDGVEVHNAKTKPREEQYNSTYRVVSVLTVLHQDWLNGKEYKCKVSNKALPAPIEKTISKAKGQPREPQVYTLPPSREEMTKNQVSLTCLVKGFYPSDIAVEWESNGQPENNYKTTPPVLDSDGSFFLYSKLTVDKSRWQQGNVFSCSVMHEALHNHYTQKSLSLSPGK

SEQ ID NO: 36618 - protein, 117 aa, Artificial Sequence
  Description of Artificial Sequence: Synthetic polypeptide
  VH of XENP021204
EVQVLESGGGLVQPGGSLRLSCAASGFTFSRYAMSWVRQAPGKRLEWVSSISSGGSTYYPDSVKGRFTISRDNSKNTLYLQMNSLRAEDTAVYYCARGDYEGYFDYWGQGTLVTVSS

SEQ ID NO: 36619 - protein, 5 aa, Artificial Sequence
  Description of Artificial Sequence: Synthetic peptide
  XENP021204 vhCDR1
RYAMS

SEQ ID NO: 36620 - protein, 16 aa, Artificial Sequence
  Description of Artificial Sequence: Synthetic peptide
  XENP021204 vhCDR2
SISSGGSTYYPDSVKG

SEQ ID NO: 36621 - protein, 9 aa, Artificial Sequence
  Description of Artificial Sequence: Synthetic peptide
  XENP021204 vhCDR3
GDYEGYFDY

SEQ ID NO: 36622 - protein, 220 aa, Artificial Sequence
  Description of Artificial Sequence: Synthetic polypeptide
  XENP021204 7C2_H1.1_L1.1_IgG1_PVA_/S267K Light Chain
DIVMTQSPDSLAVSLGERATINCKSSQSLLNSINQKNYLAWYQQKPGQSPKLLVYFASTRESGVPDRFIGSGSGTDFTLTISSLQAEDVAVYFCQQHYSTPLTFGAGTKLEIKRTVAAPSVFIFPPSDEQLKSGTASVVCLLNNFYPREAKVQWKVDNALQSGNSQESVTEQDSKDSTYSLSSTLTLSKADYEKHKVYACEVTHQGLSSPVTKSFNRGEC

SEQ ID NO: 36623 - protein, 113 aa, Artificial Sequence
  Description of Artificial Sequence: Synthetic polypeptide
  VL of XENP021204
DIVMTQSPDSLAVSLGERATINCKSSQSLLNSINQKNYLAWYQQKPGQSPKLLVYFASTRESGVPDRFIGSGSGTDFTLTISSLQAEDVAVYFCQQHYSTPLTFGAGTKLEIK

SEQ ID NO: 36624 - protein, 17 aa, Artificial Sequence
  Description of Artificial Sequence: Synthetic peptide
  XENP021204 vlCDR1
KSSQSLLNSINQKNYLA

SEQ ID NO: 36625 - protein, 7 aa, Artificial Sequence
  Description of Artificial Sequence: Synthetic peptide
  XENP021204 vlCDR2
FASTRES

SEQ ID NO: 36626 - protein, 9 aa, Artificial Sequence
  Description of Artificial Sequence: Synthetic peptide
  XENP021204 vlCDR3
QQHYSTPLT

SEQ ID NO: 36627 - protein, 442 aa, Artificial Sequence
  Description of Artificial Sequence: Synthetic polypeptide
  XENP021492 1D12_H0L0_IgG1_PVA_/S267K Heavy Chain
EVQLVESGGGLVKPGGSLKFSCAASGFAFSSFDMSWVRQTPEKRLEWVAYISSDGASTFYPDTMKGRFTISRDNAKNTLYLQMSSLKSEDTAMYYCTRLGAYWGQGTLVTVSAASTKGPSVFPLAPSSKSTSGGTAALGCLVKDYFPEPVTVSWNSGALTSGVHTFPAVLQSSGLYSLSSVVTVPSSSLGTQTYICNVNHKPSNTKVDKKVEPKSCDKTHTCPPCPAPPVAGPSVFLFPPKPKDTLMISRTPEVTCVVVDVKHEDPEVKFNWYVDGVEVHNAKTKPREEQYNSTYRVVSVLTVLHQDWLNGKEYKCKVSNKALPAPIEKTISKAKGQPREPQVYTLPPSREEMTKNQVSLTCLVKGFYPSDIAVEWESNGQPENNYKTTPPVLDSDGSFFLYSKLTVDKSRWQQGNVFSCSVMHEALHNHYTQKSLSLSPGK

SEQ ID NO: 36628 - protein, 113 aa, Artificial Sequence
  Description of Artificial Sequence: Synthetic polypeptide
  VH of XENP021492
EVQLVESGGGLVKPGGSLKFSCAASGFAFSSFDMSWVRQTPEKRLEWVAYISSDGASTFYPDTMKGRFTISRDNAKNTLYLQMSSLKSEDTAMYYCTRLGAYWGQGTLVTVSA

SEQ ID NO: 36629 - protein, 5 aa, Artificial Sequence
  Description of Artificial Sequence: Synthetic peptide
  XENP021492 vhCDR1
SFDMS

SEQ ID NO: 36630 - protein, 17 aa, Artificial Sequence
  Description of Artificial Sequence: Synthetic peptide
  XENP021492 vhCDR2
YISSDGASTFYPDTMKG

SEQ ID NO: 36631 - protein, 4 aa, Artificial Sequence
  Description of Artificial Sequence: Synthetic peptide
  XENP021492 vhCDR3
LGAY

SEQ ID NO: 36632 - protein, 218 aa, Artificial Sequence
  Description of Artificial Sequence: Synthetic polypeptide
  XENP021492 1D12_H0L0_IgG1_PVA_/S267K Light Chain
DIVLTQSPASLAVSLGQRATISCRASESVEYYGTSLMQWYQQKPGQPPKLLIYAASNVESGVPARFSGSGSGTDFSLNIHPVEEDDIAMYFCQQSRKVPWTFGGGTKLEIKRTVAAPSVFIFPPSDEQLKSGTASVVCLLNNFYPREAKVQWKVDNALQSGNSQESVTEQDSKDSTYSLSSTLTLSKADYEKHKVYACEVTHQGLSSPVTKSFNRGEC

SEQ ID NO: 36633 - protein, 111 aa, Artificial Sequence
  Description of Artificial Sequence: Synthetic polypeptide
  VL of XENP021492
DIVLTQSPASLAVSLGQRATISCRASESVEYYGTSLMQWYQQKPGQPPKLLIYAASNVESGVPARFSGSGSGTDFSLNIHPVEEDDIAMYFCQQSRKVPWTFGGGTKLEIK

SEQ ID NO: 36634 - protein, 15 aa, Artificial Sequence
  Description of Artificial Sequence: Synthetic peptide
  XENP021492 vlCDR1
RASESVEYYGTSLMQ

SEQ ID NO: 36635 - protein, 7 aa, Artificial Sequence
  Description of Artificial Sequence: Synthetic peptide
  XENP021492 vlCDR2
AASNVES

SEQ ID NO: 36636 - protein, 9 aa, Artificial Sequence
  Description of Artificial Sequence: Synthetic peptide
  XENP021492 vlCDR3
QQSRKVPWT

SEQ ID NO: 36637 - protein, 446 aa, Artificial Sequence
  Description of Artificial Sequence: Synthetic polypeptide
  XENP021493 6C8_H0L0_IgG1_PVA_/S267K Heavy Chain
QVQLKESGPGLVAPSQSLSITCTVSGFSLNGYGVNWVRQPPGKGLEWLGMIWGDGSTDYNSALKSRLSISKDNSKSQVFLKMNSLQTDDTARYYCARSYYTSDEDYWGQGTLVTVSAASTKGPSVFPLAPSSKSTSGGTAALGCLVKDYFPEPVTVSWNSGALTSGVHTFPAVLQSSGLYSLSSVVTVPSSSLGTQTYICNVNHKPSNTKVDKKVEPKSCDKTHTCPPCPAPPVAGPSVFLFPPKPKDTLMISRTPEVTCVVVDVKHEDPEVKFNWYVDGVEVHNAKTKPREEQYNSTYRVVSVLTVLHQDWLNGKEYKCKVSNKALPAPIEKTISKAKGQPREPQVYTLPPSREEMTKNQVSLTCLVKGFYPSDIAVEWESNGQPENNYKTTPPVLDSDGSFFLYSKLTVDKSRWQQGNVFSCSVMHEALHNHYTQKSLSLSPGK

SEQ ID NO: 36638 - protein, 117 aa, Artificial Sequence
  Description of Artificial Sequence: Synthetic polypeptide
  VH of XENP021493
QVQLKESGPGLVAPSQSLSITCTVSGFSLNGYGVNWVRQPPGKGLEWLGMIWGDGSTDYNSALKSRLSISKDNSKSQVFLKMNSLQTDDTARYYCARSYYTSDEDYWGQGTLVTVSA

SEQ ID NO: 36639 - protein, 5 aa, Artificial Sequence
  Description of Artificial Sequence: Synthetic peptide
  XENP021493 vhCDR1
GYGVN

SEQ ID NO: 36640 - protein, 16 aa, Artificial Sequence
  Description of Artificial Sequence: Synthetic peptide
  XENP021493 vhCDR2
MIWGDGSTDYNSALKS

SEQ ID NO: 36641 - protein, 9 aa, Artificial Sequence
  Description of Artificial Sequence: Synthetic peptide
  XENP021493 vhCDR3
SYYTSDEDY

SEQ ID NO: 36642 - protein, 214 aa, Artificial Sequence
  Description of Artificial Sequence: Synthetic polypeptide
  XENP021493 6C8_H0L0_IgG1_PVA_/S267K Light Chain
DIVMTQSQKFMSTSVGDRVSVTCKASQNVGSNVAWCQQKPGQSPKALIYSASFRYSGVPDRFTGSGSGTDFTLTISNVQSEDLAEYFCQQYNSYPYTFGGGTKLEIKRTVAAPSVFIFPPSDEQLKSGTASVVCLLNNFYPREAKVQWKVDNALQSGNSQESVTEQDSKDSTYSLSSTLTLSKADYEKHKVYACEVTHQGLSSPVTKSFNRGEC

SEQ ID NO: 36643 - protein, 107 aa, Artificial Sequence
  Description of Artificial Sequence: Synthetic polypeptide
  VL of XENP021493
DIVMTQSQKFMSTSVGDRVSVTCKASQNVGSNVAWCQQKPGQSPKALIYSASFRYSGVPDRFTGSGSGTDFTLTISNVQSEDLAEYFCQQYNSYPYTFGGGTKLEIK

SEQ ID NO: 36644 - protein, 11 aa, Artificial Sequence
  Description of Artificial Sequence: Synthetic peptide
  XENP021493 vlCDR1
KASQNVGSNVA

SEQ ID NO: 36645 - protein, 7 aa, Artificial Sequence
  Description of Artificial Sequence: Synthetic peptide
  XENP021493 vlCDR2
SASFRYS

SEQ ID NO: 36646 - protein, 9 aa, Artificial Sequence
  Description of Artificial Sequence: Synthetic peptide
  XENP021493 vlCDR3
QQYNSYPYT

SEQ ID NO: 36647 - protein, 446 aa, Artificial Sequence
  Description of Artificial Sequence: Synthetic polypeptide
  XENP021494 6D9_H0_1D12_L0_IgG1_PVA_/S267K Heavy Chain
QVQLKQSGPGLVQPSQSLSITCTVSGFSLTSYGVHWVRQSPGKGLEWLGVIWSGGSTEYNAAFISRLSISKDNSKSQVFFKMNSLQADDTAIYYCARGGLLSPFDYWGQGTTLTVSSASTKGPSVFPLAPSSKSTSGGTAALGCLVKDYFPEPVTVSWNSGALTSGVHTFPAVLQSSGLYSLSSVVTVPSSSLGTQTYICNVNHKPSNTKVDKKVEPKSCDKTHTCPPCPAPPVAGPSVFLFPPKPKDTLMISRTPEVTCVVVDVKHEDPEVKFNWYVDGVEVHNAKTKPREEQYNSTYRVVSVLTVLHQDWLNGKEYKCKVSNKALPAPIEKTISKAKGQPREPQVYTLPPSREEMTKNQVSLTCLVKGFYPSDIAVEWESNGQPENNYKTTPPVLDSDGSFFLYSKLTVDKSRWQQGNVFSCSVMHEALHNHYTQKSLSLSPGK

SEQ ID NO: 36648 - protein, 117 aa, Artificial Sequence
  Description of Artificial Sequence: Synthetic polypeptide
  VH of XENP021494
QVQLKQSGPGLVQPSQSLSITCTVSGFSLTSYGVHWVRQSPGKGLEWLGVIWSGGSTEYNAAFISRLSISKDNSKSQVFFKMNSLQADDTAIYYCARGGLLSPFDYWGQGTTLTVSS

SEQ ID NO: 36649 - protein, 5 aa, Artificial Sequence
  Description of Artificial Sequence: Synthetic peptide
  XENP021494 vhCDR1
SYGVH

SEQ ID NO: 36650 - protein, 16 aa, Artificial Sequence
  Description of Artificial Sequence: Synthetic peptide
  XENP021494 vhCDR2
VIWSGGSTEYNAAFIS

SEQ ID NO: 36651 - protein, 9 aa, Artificial Sequence
  Description of Artificial Sequence: Synthetic peptide
  XENP021494 vhCDR3
GGLLSPFDY

SEQ ID NO: 36652 - protein, 218 aa, Artificial Sequence; identical to SEQ ID NO: 36632
  Description of Artificial Sequence: Synthetic polypeptide
  XENP021494 6D9_H0_1D12_L0_IgG1_PVA_/S267K Light Chain

SEQ ID NO: 36653 - protein, 111 aa, Artificial Sequence; identical to SEQ ID NO: 36633
  Description of Artificial Sequence: Synthetic polypeptide
  VL of XENP021494

SEQ ID NO: 36654 - protein, 15 aa, Artificial Sequence
  Description of Artificial Sequence: Synthetic peptide
  XENP021494 vlCDR1
RASESVEYYGTSLMQ

SEQ ID NO: 36655 - protein, 7 aa, Artificial Sequence
  Description of Artificial Sequence: Synthetic peptide
  XENP021494 vlCDR2
AASNVES

SEQ ID NO: 36656 - protein, 9 aa, Artificial Sequence
  Description of Artificial Sequence: Synthetic peptide
  XENP021494 vlCDR3
QQSRKVPWT

SEQ ID NO: 36657 - protein, 452 aa, Artificial Sequence
  Description of Artificial Sequence: Synthetic polypeptide
  XENP021495 7A9_H0L0_IgG1_PVA_/S267K Heavy Chain
EVKLLESGGGLVQPGGSLKLSCAASGFDFSRYWMSWVRQAPGKGLEWIGEINPDSSTINYTPSLKDKFLISRDNAKNTLYLQMSKVRSEDTALYYCARPNGYYVGTIFPFAYWGQGTLVTVSAASTKGPSVFPLAPSSKSTSGGTAALGCLVKDYFPEPVTVSWNSGALTSGVHTFPAVLQSSGLYSLSSVVTVPSSSLGTQTYICNVNHKPSNTKVDKKVEPKSCDKTHTCPPCPAPPVAGPSVFLFPPKPKDTLMISRTPEVTCVVVDVKHEDPEVKFNWYVDGVEVHNAKTKPREEQYNSTYRVVSVLTVLHQDWLNGKEYKCKVSNKALPAPIEKTISKAKGQPREPQVYTLPPSREEMTKNQVSLTCLVKGFYPSDIAVEWESNGQPENNYKTTPPVLDSDGSFFLYSKLTVDKSRWQQGNVFSCSVMHEALHNHYTQKSLSLSPGK

SEQ ID NO: 36658 - protein, 123 aa, Artificial Sequence
  Description of Artificial Sequence: Synthetic polypeptide
  VH of XENP021495
EVKLLESGGGLVQPGGSLKLSCAASGFDFSRYWMSWVRQAPGKGLEWIGEINPDSSTINYTPSLKDKFLISRDNAKNTLYLQMSKVRSEDTALYYCARPNGYYVGTIFPFAYWGQGTLVTVSA

SEQ ID NO: 36659 - protein, 5 aa, Artificial Sequence
  Description of Artificial Sequence: Synthetic peptide
  XENP021495 vhCDR1
RYWMS

SEQ ID NO: 36660 - protein, 17 aa, Artificial Sequence
  Description of Artificial Sequence: Synthetic peptide
  XENP021495 vhCDR2
EINPDSSTINYTPSLKD

SEQ ID NO: 36661 - protein, 14 aa, Artificial Sequence
  Description of Artificial Sequence: Synthetic peptide
  XENP021495 vhCDR3
PNGYYVGTIFPFAY

SEQ ID NO: 36662 - protein, 215 aa, Artificial Sequence
  Description of Artificial Sequence: Synthetic polypeptide
  XENP021495 7A9_H0L0_IgG1_PVA_/S267K Light Chain
QAVVTQESALTTSPGETVTLTCRSSTGAVTTSNYANWVQEKPDHLFTGLIGGTNNRAPGVPARFSGSLIGDKAALTITGAQTEDEAIYFCALWYSNHWVFGGGTKLTVLGQPKAAPSVTLFPPSSEELQANKATLVCLISDFYPGAVTVAWKADSSPVKAGVETTTPSKQSNNKYAASSYLSLTPEQWKSHRSYSCQVTHEGSTVEKTVAPTECS

SEQ ID NO: 36663 - protein, 215 aa, Artificial Sequence; identical to SEQ ID NO: 36662
  Description of Artificial Sequence: Synthetic polypeptide
  VL of XENP021495

SEQ ID NO: 36664 - protein, 14 aa, Artificial Sequence
  Description of Artificial Sequence: Synthetic peptide
  XENP021495 vlCDR1
RSSTGAVTTSNYAN

SEQ ID NO: 36665 - protein, 7 aa, Artificial Sequence
  Description of Artificial Sequence: Synthetic peptide
  XENP021495 vlCDR2
GTNNRAP

SEQ ID NO: 36666 - protein, 9 aa, Artificial Sequence
  Description of Artificial Sequence: Synthetic peptide
  XENP021495 vlCDR3
ALWYSNHWV

SEQ ID NO: 36667 - protein, 447 aa, Artificial Sequence; identical to SEQ ID NO: 20835
  Description of Artificial Sequence: Synthetic polypeptide
  XENP021496 7B11_H0L0_IgG1_PVA_/S267K Heavy Chain

SEQ ID NO: 36668 - protein, 118 aa, Artificial Sequence; identical to SEQ ID NO: 20836
  Description of Artificial Sequence: Synthetic polypeptide
  VH of XENP021496

SEQ ID NO: 36669 - protein, 5 aa, Artificial Sequence
  Description of Artificial Sequence: Synthetic peptide
  XENP021496 vhCDR1
SYAVN

SEQ ID NO: 36670 - protein, 16 aa, Artificial Sequence
  Description of Artificial Sequence: Synthetic peptide
  XENP021496 vhCDR2
VIWSGGSTDYNAAFIS

SEQ ID NO: 36671 - protein, 10 aa, Artificial Sequence
  Description of Artificial Sequence: Synthetic peptide
  XENP021496 vhCDR3
LYYRYDGFDY

SEQ ID NO: 36672 - protein, 214 aa, Artificial Sequence
  Description of Artificial Sequence: Synthetic polypeptide
  XENP021496 7B11_H0L0_IgG1_PVA_/S267K Light Chain
DIVMTQSQKFMSTSVGDRVSVTCKASQNVGTHVAWYQQKPGQSPKALVYSASYRYSGVPDRFTGSGSGTDFTLTISNVQSEDLAEYFCQQYNSYPLTFGGGTKLEIKRTVAAPSVFIFPPSDEQLKSGTASVVCLLNNFYPREAKVQWKVDNALQSGNSQESVTEQDSKDSTYSLSSTLTLSKADYEKHKVYACEVTHQGLSSPVTKSFNRGEC

SEQ ID NO: 36673 - protein, 107 aa, Artificial Sequence
  Description of Artificial Sequence: Synthetic polypeptide
  VL of XENP021496
DIVMTQSQKFMSTSVGDRVSVTCKASQNVGTHVAWYQQKPGQSPKALVYSASYRYSGVPDRFTGSGSGTDFTLTISNVQSEDLAEYFCQQYNSYPLTFGGGTKLEIK

SEQ ID NO: 36674 - protein, 11 aa, Artificial Sequence
  Description of Artificial Sequence: Synthetic peptide
  XENP021496 vlCDR1
KASQNVGTHVA

SEQ ID NO: 36675 - protein, 7 aa, Artificial Sequence
  Description of Artificial Sequence: Synthetic peptide
  XENP021496 vlCDR2
SASYRYS

SEQ ID NO: 36676 - protein, 9 aa, Artificial Sequence
  Description of Artificial Sequence: Synthetic peptide
  XENP021496 vlCDR3
QQYNSYPLT

SEQ ID NO: 36677 - protein, 447 aa, Artificial Sequence; identical to SEQ ID NO: 20845
  Description of Artificial Sequence: Synthetic polypeptide
  XENP021501 7B11var_H0L0_IgG1_PVA_/S267K Heavy Chain

SEQ ID NO: 36678 - protein, 118 aa, Artificial Sequence; identical to SEQ ID NO: 20846
  Description of Artificial Sequence: Synthetic polypeptide
  VH of XENP021501

SEQ ID NO: 36679 - protein, 5 aa, Artificial Sequence
  Description of Artificial Sequence: Synthetic peptide
  XENP021501 vhCDR1
SYAVN

SEQ ID NO: 36680 - protein, 16 aa, Artificial Sequence
  Description of Artificial Sequence: Synthetic peptide
  XENP021501 vhCDR2
VIWSGGSTDYNAAFIS

SEQ ID NO: 36681 - protein, 10 aa, Artificial Sequence
  Description of Artificial Sequence: Synthetic peptide
  XENP021501 vhCDR3
LYYRYDGFDY

SEQ ID NO: 36682 - protein, 214 aa, Artificial Sequence; identical to SEQ ID NO: 36672
  Description of Artificial Sequence: Synthetic polypeptide
  XENP021501 7B11var_H0L0_IgG1_PVA_/S267K Light Chain

SEQ ID NO: 36683 - protein, 107 aa, Artificial Sequence; identical to SEQ ID NO: 36673
  Description of Artificial Sequence: Synthetic polypeptide
  VL of XENP021501

SEQ ID NO: 36684 - protein, 11 aa, Artificial Sequence
  Description of Artificial Sequence: Synthetic peptide
  XENP021501 vlCDR1
KASQNVGTHVA

SEQ ID NO: 36685 - protein, 7 aa, Artificial Sequence
  Description of Artificial Sequence: Synthetic peptide
  XENP021501 vlCDR2
SASYRYS

SEQ ID NO: 36686 - protein, 9 aa, Artificial Sequence
  Description of Artificial Sequence: Synthetic peptide
  XENP021501 vlCDR3
QQYNSYPLT

SEQ ID NO: 36687 - protein, 446 aa, Artificial Sequence
  Description of Artificial Sequence: Synthetic polypeptide
  XENP021502 7C2_H0L0_IgG1_PVA_/S267K Heavy Chain
EVKVVESGGGLVKPGGSLKLSCAASGFTFSRYAMSWVRQTPEKRLEWVASISSGGSTYYPDSVQGRFTISRDNARNILYLQMSSLRSEDTAMYYCARGDYEGYFDYWGQGTSLTVSSASTKGPSVFPLAPSSKSTSGGTAALGCLVKDYFPEPVTVSWNSGALTSGVHTFPAVLQSSGLYSLSSVVTVPSSSLGTQTYICNVNHKPSNTKVDKKVEPKSCDKTHTCPPCPAPPVAGPSVFLFPPKPKDTLMISRTPEVTCVVVDVKHEDPEVKFNWYVDGVEVHNAKTKPREEQYNSTYRVVSVLTVLHQDWLNGKEYKCKVSNKALPAPIEKTISKAKGQPREPQVYTLPPSREEMTKNQVSLTCLVKGFYPSDIAVEWESNGQPENNYKTTPPVLDSDGSFFLYSKLTVDKSRWQQGNVFSCSVMHEALHNHYTQKSLSLSPGK

SEQ ID NO: 36688 - protein, 117 aa, Artificial Sequence
  Description of Artificial Sequence: Synthetic polypeptide
  VH of XENP021502
EVKVVESGGGLVKPGGSLKLSCAASGFTFSRYAMSWVRQTPEKRLEWVASISSGGSTYYPDSVQGRFTISRDNARNILYLQMSSLRSEDTAMYYCARGDYEGYFDYWGQGTSLTVSS

SEQ ID NO: 36689 - protein, 5 aa, Artificial Sequence
  Description of Artificial Sequence: Synthetic peptide
  XENP021502 vhCDR1
RYAMS

SEQ ID NO: 36690 - protein, 16 aa, Artificial Sequence
  Description of Artificial Sequence: Synthetic peptide
  XENP021502 vhCDR2
SISSGGSTYYPDSVQG

SEQ ID NO: 36691 - protein, 9 aa, Artificial Sequence
  Description of Artificial Sequence: Synthetic peptide
  XENP021502 vhCDR3
GDYEGYFDY

SEQ ID NO: 36692 - protein, 220 aa, Artificial Sequence
  Description of Artificial Sequence: Synthetic polypeptide
  XENP021502 7C2_H0L0_IgG1_PVA_/S267K Light Chain
DIVMTQSPSSLAMSVGQKVTMSCKSSQSLLNSINQKNYLAWYQQKPGQSPKLLVYFASTRESGVPDRFIGSGSGTDFTLTISSVQAEDLADYFCQQHYSTPLTFGAGTKLELKRTVAAPSVFIFPPSDEQLKSGTASVVCLLNNFYPREAKVQWKVDNALQSGNSQESVTEQDSKDSTYSLSSTLTLSKADYEKHKVYACEVTHQGLSSPVTKSFNRGEC

SEQ ID NO: 36693 - protein, 113 aa, Artificial Sequence
  Description of Artificial Sequence: Synthetic polypeptide
  VL of XENP021502
DIVMTQSPSSLAMSVGQKVTMSCKSSQSLLNSINQKNYLAWYQQKPGQSPKLLVYFASTRESGVPDRFIGSGSGTDFTLTISSVQAEDLADYFCQQHYSTPLTFGAGTKLELK

SEQ ID NO: 36694 - protein, 17 aa, Artificial Sequence
  Description of Artificial Sequence: Synthetic peptide
  XENP021502 vlCDR1
KSSQSLLNSINQKNYLA

SEQ ID NO: 36695 - protein, 7 aa, Artificial Sequence
  Description of Artificial Sequence: Synthetic peptide
  XENP021502 vlCDR2
FASTRES

SEQ ID NO: 36696 - protein, 9 aa, Artificial Sequence
  Description of Artificial Sequence: Synthetic peptide
  XENP021502 vlCDR3
QQHYSTPLT

SEQ ID NO: 36697 - protein, 442 aa, Artificial Sequence; identical to SEQ ID NO: 36627
  Description of Artificial Sequence: Synthetic polypeptide
  XENP021503 1D10_H0L0_IgG1_PVA_/S267K Heavy Chain

SEQ ID NO: 36698 - protein, 113 aa, Artificial Sequence; identical to SEQ ID NO: 36628
  Description of Artificial Sequence: Synthetic polypeptide
  VH of XENP021503

SEQ ID NO: 36699 - protein, 5 aa, Artificial Sequence
  Description of Artificial Sequence: Synthetic peptide
  XENP021503 vhCDR1
SFDMS

SEQ ID NO: 36700 - protein, 17 aa, Artificial Sequence
  Description of Artificial Sequence: Synthetic peptide
  XENP021503 vhCDR2
YISSDGASTFYPDTMKG

SEQ ID NO: 36701 - protein, 4 aa, Artificial Sequence
  Description of Artificial Sequence: Synthetic peptide
  XENP021503 vhCDR3
LGAY

SEQ ID NO: 36702 - protein, 219 aa, Artificial Sequence
  Description of Artificial Sequence: Synthetic polypeptide
  XENP021503 1D10_H0L0_IgG1_PVA_/S267K Light Chain
DVVMTQTPLTLSVTIGQPASISCKSSQSLLDSDGKTYLNWLLQRPGQSPKRLIYLVSKLDSGVPDRFTGSGSGTDFTLKISRVEAEDLGVYYCWQGTHFPYTFGGGTKLEIKRTVAAPSVFIFPPSDEQLKSGTASVVCLLNNFYPREAKVQWKVDNALQSGNSQESVTEQDSKDSTYSLSSTLTLSKADYEKHKVYACEVTHQGLSSPVTKSFNRGEC

SEQ ID NO: 36703 - protein, 112 aa, Artificial Sequence
  Description of Artificial Sequence: Synthetic polypeptide
  VL of XENP021503
DVVMTQTPLTLSVTIGQPASISCKSSQSLLDSDGKTYLNWLLQRPGQSPKRLIYLVSKLDSGVPDRFTGSGSGTDFTLKISRVEAEDLGVYYCWQGTHFPYTFGGGTKLEIK

SEQ ID NO: 36704 - protein, 16 aa, Artificial Sequence
  Description of Artificial Sequence: Synthetic peptide
  XENP021503 vlCDR1
KSSQSLLDSDGKTYLN

SEQ ID NO: 36705 - protein, 7 aa, Artificial Sequence
  Description of Artificial Sequence: Synthetic peptide
  XENP021503 vlCDR2
LVSKLDS

SEQ ID NO: 36706 - protein, 9 aa, Artificial Sequence
  Description of Artificial Sequence: Synthetic peptide
  XENP021503 vlCDR3
WQGTHFPYT

SEQ ID NO: 36707 - protein, 120 aa, Artificial Sequence
  Description of Artificial Sequence: Synthetic polypeptide
  3C2[BTLA] variable heavy Chain
QVQLQESGPGLVKPSETLSLTCTISGGSISNYYWNWIRQPPGKGLEWIGYIYYSTSTKYNPSLKSRVTMSVETSKNQFSLKLSSVTAADTAVYYCARVKVYSTGWFFDYWGQGTLVTVSS

SEQ ID NO: 36708 - protein, 5 aa, Artificial Sequence
  Description of Artificial Sequence: Synthetic peptide
  3C2[BTLA] vhCDR1
NYYWN

SEQ ID NO: 36709 - protein, 16 aa, Artificial Sequence
  Description of Artificial Sequence: Synthetic peptide
  3C2[BTLA] vhCDR2
YIYYSTSTKYNPSLKS

SEQ ID NO: 36710 - protein, 12 aa, Artificial Sequence
  Description of Artificial Sequence: Synthetic peptide
  3C2[BTLA] vhCDR3
VKVYSTGWFFDY

SEQ ID NO: 36711 - protein, 107 aa, Artificial Sequence [sequence omitted]

SEQ ID NO: 36712 - protein, 11 aa, Artificial Sequence
  Description of Artificial Sequence: Synthetic peptide
  3C2[BTLA] vlCDR1
RASQGISSALA

SEQ ID NO: 36713 - protein, 7 aa, Artificial Sequence
  Description of Artificial Sequence: Synthetic peptide
  3C2[BTLA] vlCDR2
DASSLES

SEQ ID NO: 36714 - protein, 9 aa, Artificial Sequence
  Description of Artificial Sequence: Synthetic peptide
  3C2[BTLA] vlCDR3
QQFNSYPLT

SEQ ID NO: 36715 - protein, 127 aa, Artificial Sequence
  Description of Artificial Sequence: Synthetic polypeptide
  11E2[BTLA] variable heavy Chain
EVQLVESGGGVIRPGGSLRLSCAASGFTFDDYGMSWVRQAPGKGLEWVSGINWNGGSTGYAASVKGRFTISRDNAKNSLYLQMNSLRAEDSALYYCARDYYYGPGSPNYFYYAMDVWGQGTTVTVSS

SEQ ID NO: 36716 - protein, 5 aa, Artificial Sequence
  Description of Artificial Sequence: Synthetic peptide
  11E2[BTLA] vhCDR1
DYGMS

SEQ ID NO: 36717 - protein, 17 aa, Artificial Sequence
  Description of Artificial Sequence: Synthetic peptide
  11E2[BTLA] vhCDR2
GINWNGGSTGYAASVKG

SEQ ID NO: 36718 - protein, 18 aa, Artificial Sequence
  Description of Artificial Sequence: Synthetic peptide
  11E2[BTLA] vhCDR3
DYYYGPGSPNYFYYAMDV

SEQ ID NO: 36719 - protein, 107 aa, Artificial Sequence
  Description of Artificial Sequence: Synthetic polypeptide
  11E2[BTLA] variable light Chain
DIQMTQSPSSLSASVGDRVTITCRASQGISSWLAWYQQKPEKAPKSLIYAASSLQSGVPSRFSGSGSGTDFTLTISSLQPEDFATYYCQQYNSYPRTFGQGTKVEIK

SEQ ID NO: 36720 - protein, 11 aa, Artificial Sequence
  Description of Artificial Sequence: Synthetic peptide
  11E2[BTLA] vlCDR1
RASQGISSWLA

SEQ ID NO: 36721 - protein, 7 aa, Artificial Sequence
  Description of Artificial Sequence: Synthetic peptide
  11E2[BTLA] vlCDR2
AASSLQS

SEQ ID NO: 36722 - protein, 9 aa, Artificial Sequence
  Description of Artificial Sequence: Synthetic peptide
  11E2[BTLA] vlCDR3
QQYNSYPRT

SEQ ID NO: 36723 - protein, 119 aa, Artificial Sequence; identical to SEQ ID NO: 20886
  Description of Artificial Sequence: Synthetic polypeptide
  4C7[BTLA] variable heavy Chain

SEQ ID NO: 36724 - protein, 5 aa, Artificial Sequence
  Description of Artificial Sequence: Synthetic peptide
  4C7[BTLA] vhCDR1
HYYWS

SEQ ID NO: 36725 - protein, 16 aa, Artificial Sequence
  Description of Artificial Sequence: Synthetic peptide
  4C7[BTLA] vhCDR2
YIYYSGSTKYNPSLKS

SEQ ID NO: 36726 - protein, 11 aa, Artificial Sequence
  Description of Artificial Sequence: Synthetic peptide
  4C7[BTLA] vhCDR3
EWPYYYYEMDV

SEQ ID NO: 36727 - protein, 108 aa, Artificial Sequence; identical to SEQ ID NO: 20891
  Description of Artificial Sequence: Synthetic polypeptide
  4C7[BTLA] variable light Chain

SEQ ID NO: 36728 - protein, 12 aa, Artificial Sequence
  Description of Artificial Sequence: Synthetic peptide
  4C7[BTLA] vlCDR1
RASQSVSSSYLA

SEQ ID NO: 36729 - protein, 7 aa, Artificial Sequence
  Description of Artificial Sequence: Synthetic peptide
  4C7[BTLA] vlCDR2
GASSRAT

SEQ ID NO: 36730 - protein, 9 aa, Artificial Sequence
  Description of Artificial Sequence: Synthetic peptide
  4C7[BTLA] vlCDR3
QQYGSSFRT

SEQ ID NO: 36731 - protein, 121 aa, Artificial Sequence; identical to SEQ ID NO: 20896
  Description of Artificial Sequence: Synthetic polypeptide
  8D5[BTLA] variable heavy Chain

SEQ ID NO: 36732 - protein, 5 aa, Artificial Sequence
  Description of Artificial Sequence: Synthetic peptide
  8D5[BTLA] vhCDR1
SYDMH

SEQ ID NO: 36733 - protein, 16 aa, Artificial Sequence
  Description of Artificial Sequence: Synthetic peptide
  8D5[BTLA] vhCDR2
VIGPAGDTYYPGSVKG

SEQ ID NO: 36734 - protein, 13 aa, Artificial Sequence
  Description of Artificial Sequence: Synthetic peptide
  8D5[BTLA] vhCDR3
EGMAAHNYYGMDV

SEQ ID NO: 36735 - protein, 108 aa, Artificial Sequence; identical to SEQ ID NO: 20901
  Description of Artificial Sequence: Synthetic polypeptide
  8D5[BTLA] variable light Chain

SEQ ID NO: 36736 - protein, 11 aa, Artificial Sequence
  Description of Artificial Sequence: Synthetic peptide
  8D5[BTLA] vlCDR1
RASQSVSSYLA

SEQ ID NO: 36737 - protein, 7 aa, Artificial Sequence
  Description of Artificial Sequence: Synthetic peptide
  8D5[BTLA] vlCDR2
DASNRAT

SEQ ID NO: 36738 - protein, 10 aa, Artificial Sequence
  Description of Artificial Sequence: Synthetic peptide
  8D5[BTLA] vlCDR3
QQRSNWPPIT

SEQ ID NO: 36739 - protein, 118 aa, Artificial Sequence; identical to SEQ ID NO: 22
  Description of Artificial Sequence: Synthetic polypeptide
  ipilimumab[CTLA-4] variable heavy Chain

SEQ ID NO: 36740 - protein, 5 aa, Artificial Sequence
  Description of Artificial Sequence: Synthetic peptide
  ipilimumab[CTLA-4] vhCDR1
SYTMH

SEQ ID NO: 36741 - protein, 17 aa, Artificial Sequence
  Description of Artificial Sequence: Synthetic peptide
  ipilimumab[CTLA-4] vhCDR2
FISYDGNNKYYADSVKG

SEQ ID NO: 36742 - protein, 9 aa, Artificial Sequence
  Description of Artificial Sequence: Synthetic peptide
  ipilimumab[CTLA-4] vhCDR3
TGWLGPFDY

SEQ ID NO: 36743 - protein, 108 aa, Artificial Sequence; identical to SEQ ID NO: 23
  Description of Artificial Sequence: Synthetic polypeptide
  ipilimumab[CTLA-4] variable light Chain

SEQ ID NO: 36744 - protein, 12 aa, Artificial Sequence
  Description of Artificial Sequence: Synthetic peptide
  ipilimumab[CTLA-4] vlCDR1
RASQSVGSSYLA

SEQ ID NO: 36745 - protein, 7 aa, Artificial Sequence
  Description of Artificial Sequence: Synthetic peptide
  ipilimumab[CTLA-4] vlCDR2
GAFSRAT

SEQ ID NO: 36746 - protein, 9 aa, Artificial Sequence
  Description of Artificial Sequence: Synthetic peptide
  ipilimumab[CTLA-4] vlCDR3
QQYGSSPWT

SEQ ID NO: 36747 - protein, 125 aa, Artificial Sequence; identical to SEQ ID NO: 22690
  Description of Artificial Sequence: Synthetic polypeptide
  tremelimumab[CTLA-4] variable heavy Chain

SEQ ID NO: 36748 - protein, 5 aa, Artificial Sequence
  Description of Artificial Sequence: Synthetic peptide
  tremelimumab[CTLA-4] vhCDR1
SYGMH

SEQ ID NO: 36749 - protein, 17 aa, Artificial Sequence
  Description of Artificial Sequence: Synthetic peptide
  tremelimumab[CTLA-4] vhCDR2
VIWYDGSNKYYADSVKG

SEQ ID NO: 36750 - protein, 16 aa, Artificial Sequence
  Description of Artificial Sequence: Synthetic peptide
  tremelimumab[CTLA-4] vhCDR3
DPRGATLYYYYYGMDV

SEQ ID NO: 36751 - protein, 107 aa, Artificial Sequence; identical to SEQ ID NO: 22691
  Description of Artificial Sequence: Synthetic polypeptide
  tremelimumab[CTLA-4] variable light Chain

SEQ ID NO: 36752 - protein, 11 aa, Artificial Sequence
  Description of Artificial Sequence: Synthetic peptide
  tremelimumab[CTLA-4] vlCDR1
RASQSINSYLD

SEQ ID NO: 36753 - protein, 7 aa, Artificial Sequence
  Description of Artificial Sequence: Synthetic peptide
  tremelimumab[CTLA-4] vlCDR2
AASSLQS

SEQ ID NO: 36754 - protein, 9 aa, Artificial Sequence
  Description of Artificial Sequence: Synthetic peptide
  tremelimumab[CTLA-4] vlCDR3
QQYYSTPFT

SEQ ID NO: 36755 - protein, 118 aa, Artificial Sequence
  Description of Artificial Sequence: Synthetic polypeptide
  AGEN1884[CTLA-4] variable heavy Chain
EVQLVESGGGLVKPGGSLRLSCAASGFTFSSYSMNWVRQAPGKGLEWVSSISSSSSYIYYADSVKGRFTISRDNAKNSLYLQMNSLRAEDTAVYYCARVGLMGPFDIWGQGTMVTVSS

SEQ ID NO: 36756 - protein, 5 aa, Artificial Sequence
  Description of Artificial Sequence: Synthetic peptide
  AGEN1884[CTLA-4] vhCDR1
SYSMN

SEQ ID NO: 36757 - protein, 17 aa, Artificial Sequence
  Description of Artificial Sequence: Synthetic peptide
  AGEN1884[CTLA-4] vhCDR2
SISSSSSYIYYADSVKG

SEQ ID NO: 36758 - protein, 9 aa, Artificial Sequence
  Description of Artificial Sequence: Synthetic peptide
  AGEN1884[CTLA-4] vhCDR3
VGLMGPFDI

SEQ ID NO: 36759 - protein, 107 aa, Artificial Sequence
  Description of Artificial Sequence: Synthetic polypeptide
  AGEN1884[CTLA-4] variable light Chain
EIVLTQSPGTLSLSPGERATLSCRASQSVSRYLGWYQQKPGQAPRLLIYGASTRATGIPDRFSGSGSGTDFTLTITRLEPEDFAVYYCQQYGSSPWTFGQGTKVEIK

SEQ ID NO: 36760 - protein, 11 aa, Artificial Sequence
  Description of Artificial Sequence: Synthetic peptide
  AGEN1884[CTLA-4] vlCDR1
RASQSVSRYLG

SEQ ID NO: 36761 - protein, 7 aa, Artificial Sequence
  Description of Artificial Sequence: Synthetic peptide
  AGEN1884[CTLA-4] vlCDR2
GASTRAT

SEQ ID NO: 36762 - protein, 9 aa, Artificial Sequence
  Description of Artificial Sequence: Synthetic peptide
  AGEN1884[CTLA-4] vlCDR3
QQYGSSPWT

SEQ ID NO: 36763 - protein, 116 aa, Artificial Sequence
  Description of Artificial Sequence: Synthetic polypeptide
  4.3F6B5[CTLA-4] variable heavy Chain
EVQLQPSGPVLVKPGASVKISCKASGYTFTDYKIHWVKQSHGKSLEWIGYIYPYSGSSDYNQKFKSKATLTVDNSSTTAYMELRSLTSEDSAVYYCARGGDAMDYWGQGTAVTVSS

SEQ ID NO: 36764 - protein, 5 aa, Artificial Sequence
  Description of Artificial Sequence: Synthetic peptide
  4.3F6B5[CTLA-4] vhCDR1
DYKIH

SEQ ID NO: 36765 - protein, 17 aa, Artificial Sequence
  Description of Artificial Sequence: Synthetic peptide
  4.3F6B5[CTLA-4] vhCDR2
YIYPYSGSSDYNQKFKS

SEQ ID NO: 36766 - protein, 7 aa, Artificial Sequence
  Description of Artificial Sequence: Synthetic peptide
  4.3F6B5[CTLA-4] vhCDR3
GGDAMDY

SEQ ID NO: 36767 - protein, 106 aa, Artificial Sequence
  Description of Artificial Sequence: Synthetic polypeptide
  4.3F6B5[CTLA-4] variable light Chain
DILMTQSPASLSASVGETVTITCGASENIYGALNWYQRKQGKSPQLLIYGATNLADGMSSRFSGSGLGRQYYLKISSLHPDDVATYFCQNILGTWTFGGGTKLEIK

SEQ ID NO: 36768 - protein, 11 aa, Artificial Sequence
  Description of Artificial Sequence: Synthetic peptide
  4.3F6B5[CTLA-4] vlCDR1
GASENIYGALN

SEQ ID NO: 36769 - protein, 7 aa, Artificial Sequence
  Description of Artificial Sequence: Synthetic peptide
  4.3F6B5[CTLA-4] vlCDR2
GATNLAD

SEQ ID NO: 36770 - protein, 8 aa, Artificial Sequence
  Description of Artificial Sequence: Synthetic peptide
  4.3F6B5[CTLA-4] vlCDR3
QNILGTWT

SEQ ID NO: 36771 - protein, 117 aa, Artificial Sequence
  Description of Artificial Sequence: Synthetic polypeptide
  4.8H10H5[CTLA-4] variable heavy Chain
DVKLVESGGGLVKLGGSLKLSCAASGFTFNIYYMSWVRQTPEKRLELVAAINPDGGNTYYPDTVKGRFTISRDNAKNTLYLQMSSLKSEDSALYYCARYGGPGFDSWGQGTTLTVSS

SEQ ID NO: 36772 - protein, 5 aa, Artificial Sequence
  Description of Artificial Sequence: Synthetic peptide
  4.8H10H5[CTLA-4] vhCDR1
IYYMS

SEQ ID NO: 36773 - protein, 17 aa, Artificial Sequence
  Description of Artificial Sequence: Synthetic peptide
  4.8H10H5[CTLA-4] vhCDR2
AINPDGGNTYYPDTVKG

SEQ ID NO: 36774 - protein, 8 aa, Artificial Sequence
  Description of Artificial Sequence: Synthetic peptide
  4.8H10H5[CTLA-4] vhCDR3
YGGPGFDS

SEQ ID NO: 36775 - protein, 108 aa, Artificial Sequence
  Description of Artificial Sequence: Synthetic polypeptide
  4.8H10H5[CTLA-4] variable light Chain
ENVLTQSPAIMSASPGERVTMTCSASSSVSYMHWYQQKSNTSPKLWIYDTSKLASGVPGRFSGSGSRNSYSLTISSMEAEDVATYYCFPGSGFPFMYTFGGGTKLEIK

SEQ ID NO: 36776 - protein, 10 aa, Artificial Sequence
  Description of Artificial Sequence: Synthetic peptide
  4.8H10H5[CTLA-4] vlCDR1
SASSSVSYMH

SEQ ID NO: 36777 - protein, 7 aa, Artificial Sequence
  Description of Artificial Sequence: Synthetic peptide
  4.8H10H5[CTLA-4] vlCDR2
DTSKLAS

SEQ ID NO: 36778 - protein, 11 aa, Artificial Sequence
  Description of Artificial Sequence: Synthetic peptide
  4.8H10H5[CTLA-4] vlCDR3
FPGSGFPFMYT

SEQ ID NO: 36779 - protein, 116 aa, Artificial Sequence
  Description of Artificial Sequence: Synthetic polypeptide
  TGN2122.C[CTLA-4] variable heavy Chain
QVQLVQSGAEVKKPGASVKVSCKASGYTFTDYKIHWVRQAPGQGLEWIGYIYPYSGSSDYNQKFKSRATLTVDNSISTAYMELSRLRSDDTAVYYCARGGDAMDYWGQGTLVTVSS

SEQ ID NO: 36780 - protein, 5 aa, Artificial Sequence
  Description of Artificial Sequence: Synthetic peptide
  TGN2122.C[CTLA-4] vhCDR1
DYKIH

SEQ ID NO: 36781 - protein, 17 aa, Artificial Sequence
  Description of Artificial Sequence: Synthetic peptide
  TGN2122.C[CTLA-4] vhCDR2
YIYPYSGSSDYNQKFKS

SEQ ID NO: 36782 - protein, 7 aa, Artificial Sequence
  Description of Artificial Sequence: Synthetic peptide
  TGN2122.C[CTLA-4] vhCDR3
GGDAMDY

SEQ ID NO: 36783 - protein, 106 aa, Artificial Sequence
  Description of Artificial Sequence: Synthetic polypeptide
  TGN2122.C[CTLA-4] variable light Chain
DIQMTQSPSSLSASVGDRVTITCGASENIYGALNWYQRKPGKAPKLLIYGATNLADGVPSRFSGSGSGRDYTLTISSLQPEDFATYFCQNILGTWTFGGGTKVEIK

SEQ ID NO: 36784 - protein, 11 aa, Artificial Sequence
  Description of Artificial Sequence: Synthetic peptide
  TGN2122.C[CTLA-4] vlCDR1
GASENIYGALN

SEQ ID NO: 36785 - protein, 7 aa, Artificial Sequence
  Description of Artificial Sequence: Synthetic peptide
  TGN2122.C[CTLA-4] vlCDR2
GATNLAD

SEQ ID NO: 36786 - protein, 8 aa, Artificial Sequence
  Description of Artificial Sequence: Synthetic peptide
  TGN2122.C[CTLA-4] vlCDR3
QNILGTWT

SEQ ID NO: 36787 - protein, 117 aa, Artificial Sequence
  Description of Artificial Sequence: Synthetic polypeptide
  TGN2122.H[CTLA-4] variable heavy Chain
EVQLVESGGGLVQPGGSLRLSCAASGFTFNIYYMSWVRQAPGKGLELVAAINPDGGNTYYPDTVKGRFTISRDNAKNSLYLQMNSLRAEDTAVYYCARYGGPGFDSWGQGTLVTVSS

SEQ ID NO: 36788 - protein, 5 aa, Artificial Sequence
  Description of Artificial Sequence: Synthetic peptide
  TGN2122.H[CTLA-4] vhCDR1
IYYMS

SEQ ID NO: 36789 - protein, 17 aa, Artificial Sequence
  Description of Artificial Sequence: Synthetic peptide
  TGN2122.H[CTLA-4] vhCDR2
AINPDGGNTYYPDTVKG

SEQ ID NO: 36790 - protein, 8 aa, Artificial Sequence
  Description of Artificial Sequence: Synthetic peptide
  TGN2122.H[CTLA-4] vhCDR3
YGGPGFDS

SEQ ID NO: 36791 - protein, 108 aa, Artificial Sequence
  Description of Artificial Sequence: Synthetic polypeptide
  TGN2122.H[CTLA-4] variable light Chain
ENVLTQSPATLSLSPGERATLSCSASSSVSYMHWYQQKPGQAPRLWIYDTSKLASGIPARFSGSGSRNDYTLTISSLEPEDFAVYYCFPGSGFPFMYTFGGGTKVEIK

SEQ ID NO: 36792 - protein, 10 aa, Artificial Sequence
  Description of Artificial Sequence: Synthetic peptide
  TGN2122.H[CTLA-4] vlCDR1
SASSSVSYMH

SEQ ID NO: 36793 - protein, 7 aa, Artificial Sequence
  Description of Artificial Sequence: Synthetic peptide
  TGN2122.H[CTLA-4] vlCDR2
DTSKLAS

SEQ ID NO: 36794 - protein, 11 aa, Artificial Sequence
  Description of Artificial Sequence: Synthetic peptide
  TGN2122.H[CTLA-4] vlCDR3
FPGSGFPFMYT

SEQ ID NO: 36795 - protein, 123 aa, Artificial Sequence
  Description of Artificial Sequence: Synthetic polypeptide
  F7[CTLA-4] variable heavy Chain
QVQLVQSGAEVKKPGASVKVSCKASGYAFDGHYMHWVRQAPGQRLEWMGWVDPHSGATNYAQNFQGGVTMTRDTSINTVYMELSSLKSDDTAVYYCARDFYDTSAKSGAFDIWGQGTMVTVSS

SEQ ID NO: 36796 - protein, 5 aa, Artificial Sequence
  Description of Artificial Sequence: Synthetic peptide
  F7[CTLA-4] vhCDR1
GHYMH

SEQ ID NO: 36797 - protein, 17 aa, Artificial Sequence
  Description of Artificial Sequence: Synthetic peptide
  F7[CTLA-4] vhCDR2
WVDPHSGATNYAQNFQG

SEQ ID NO: 36798 - protein, 14 aa, Artificial Sequence
  Description of Artificial Sequence: Synthetic peptide
  F7[CTLA-4] vhCDR3
DFYDTSAKSGAFDI

SEQ ID NO: 36799 - protein, 107 aa, Artificial Sequence
  Description of Artificial Sequence: Synthetic polypeptide
  F7[CTLA-4] variable light Chain
AIQLTQSPSSVSASVGDRVTITCRASQGISSWLAWYQQKPGKAPKLLIYAASSLQSGVPSRFSGSGSGTDFTLTISSLQPEDFATYYCQQVNSFPWAFGQGTKVEIK

SEQ ID NO: 36800 - protein, 11 aa, Artificial Sequence
  Description of Artificial Sequence: Synthetic peptide
  F7[CTLA-4] vlCDR1
RASQGISSWLA

SEQ ID NO: 36801 - protein, 7 aa, Artificial Sequence
  Description of Artificial Sequence: Synthetic peptide
  F7[CTLA-4] vlCDR2
AASSLQS

SEQ ID NO: 36802 - protein, 9 aa, Artificial Sequence
  Description of Artificial Sequence: Synthetic peptide
  F7[CTLA-4] vlCDR3
QQVNSFPWA

SEQ ID NO: 36803 - protein, 121 aa, Artificial Sequence
  Description of Artificial Sequence: Synthetic polypeptide
  E8[CTLA-4] variable heavy Chain
QVQLVQSGAEVKKPGASVKVSCEASGYTFTNYYIHWLRQAPGQGLEWMGIINPSGGSTTYAQKFQGRITMTRDTSTNTLYMELSSLRSEDTAIYYCARRDCRGPSCYFAYWGQGTTVTVSS

SEQ ID NO: 36804 - protein, 5 aa, Artificial Sequence
  Description of Artificial Sequence: Synthetic peptide
  E8[CTLA-4] vhCDR1
NYYIH

SEQ ID NO: 36805 - protein, 17 aa, Artificial Sequence
  Description of Artificial Sequence: Synthetic peptide
  E8[CTLA-4] vhCDR2
IINPSGGSTTYAQKFQG

SEQ ID NO: 36806 - protein, 12 aa, Artificial Sequence
  Description of Artificial Sequence: Synthetic peptide
  E8[CTLA-4] vhCDR3
RDCRGPSCYFAY

SEQ ID NO: 36807 - protein, 107 aa, Artificial Sequence
  Description of Artificial Sequence: Synthetic polypeptide
  E8[CTLA-4] variable light Chain
DIVMTQSPSSLSASVGDRVTITCRASQSISSYLNWYQQKPGKAPKLLIYAASSLQSGVPPRFSGSGSGTEFTLTISSLQPEDFATYYCQQANSFPPTFGQGTKVDIK

SEQ ID NO: 36808 - protein, 11 aa, Artificial Sequence
  Description of Artificial Sequence: Synthetic peptide
  E8[CTLA-4] vlCDR1
RASQSISSYLN

SEQ ID NO: 36809 - protein, 7 aa, Artificial Sequence
  Description of Artificial Sequence: Synthetic peptide
  E8[CTLA-4] vlCDR2
AASSLQS

SEQ ID NO: 36810 - protein, 9 aa, Artificial Sequence
  Description of Artificial Sequence: Synthetic peptide
  E8[CTLA-4] vlCDR3
QQANSFPPT

SEQ ID NO: 36811 - protein, 114 aa, Artificial Sequence
  Description of Artificial Sequence: Synthetic polypeptide
  CT1E1[CTLA-4] variable heavy Chain
EVQLVESGGGLVQPGRSLRLSCRGSNFNFDDLAISWVRQAPGKGLEWLGFVRSKAYGETTDYVASVKGRFTISRDDSKFIAWLQMDSLKTDDTAVYYCTTFNYWGQGTLVTVSS

SEQ ID NO: 36812 - protein, 5 aa, Artificial Sequence
  Description of Artificial Sequence: Synthetic peptide
  CT1E1[CTLA-4] vhCDR1
DLAIS

SEQ ID NO: 36813 - protein, 19 aa, Artificial Sequence
  Description of Artificial Sequence: Synthetic peptide
  CT1E1[CTLA-4] vhCDR2
FVRSKAYGETTDYVASVKG

SEQ ID NO: 36814 - protein, 3 aa, Artificial Sequence
  Description of Artificial Sequence: Synthetic peptide
  CT1E1[CTLA-4] vhCDR3
FNY

SEQ ID NO: 36815 - protein, 108 aa, Artificial Sequence
  Description of Artificial Sequence: Synthetic polypeptide
  CT1E1[CTLA-4] variable light Chain
QPVLTQPPSVSVAPGKTARISCGGNNIASEAVHWYQKKPGQAPVLVIYYDSDRPSGIPERFSGSNSGNTATLRISRVDAGDEADYYCQVWDRTTDQPVFGGGTKLTVL

SEQ ID NO: 36816 - protein, 11 aa, Artificial Sequence
  Description of Artificial Sequence: Synthetic peptide
  CT1E1[CTLA-4] vlCDR1
GGNNIASEAVH

SEQ ID NO: 36817 - protein, 7 aa, Artificial Sequence
  Description of Artificial Sequence: Synthetic peptide
  CT1E1[CTLA-4] vlCDR2
YDSDRPS

SEQ ID NO: 36818 - protein, 11 aa, Artificial Sequence
  Description of Artificial Sequence: Synthetic peptide
  CT1E1[CTLA-4] vlCDR3
QVWDRTTDQPV

SEQ ID NO: 36819 - protein, 120 aa, Artificial Sequence
  Description of Artificial Sequence: Synthetic polypeptide
  BMS-986016[LAG-3] variable heavy Chain
QVQLQQWGAGLLKPSETLSLTCAVYGGSFSDYYWNWIRQPPGKGLEWIGEINHRGSTNSNPSLKSRVTLSLDTSKNQFSLKLRSVTAADTAVYYCAFGYSDYEYNWFDPWGQGTLVTVSS

SEQ ID NO: 36820 - protein, 5 aa, Artificial Sequence
  Description of Artificial Sequence: Synthetic peptide
  BMS-986016[LAG-3] vhCDR1
DYYWN

SEQ ID NO: 36821 - protein, 16 aa, Artificial Sequence
  Description of Artificial Sequence: Synthetic peptide
  BMS-986016[LAG-3] vhCDR2
EINHRGSTNSNPSLKS

SEQ ID NO: 36822 - protein, 12 aa, Artificial Sequence
  Description of Artificial Sequence: Synthetic peptide
  BMS-986016[LAG-3] vhCDR3
GYSDYEYNWFDP

SEQ ID NO: 36823 - protein, 107 aa, Artificial Sequence; identical to SEQ ID NO: 17141
  Description of Artificial Sequence: Synthetic polypeptide
  BMS-986016[LAG-3] variable light Chain

SEQ ID NO: 36824 - protein, 11 aa, Artificial Sequence
  Description of Artificial Sequence: Synthetic peptide
  BMS-986016[LAG-3] vlCDR1
RASQSISSYLA

SEQ ID NO: 36825 - protein, 7 aa, Artificial Sequence
  Description of Artificial Sequence: Synthetic peptide
  BMS-986016[LAG-3] vlCDR2
DASNRAT

SEQ ID NO: 36826 - protein, 9 aa, Artificial Sequence
  Description of Artificial Sequence: Synthetic peptide
  BMS-986016[LAG-3] vlCDR3
QQRSNWPLT

SEQ ID NO: 36827 - protein, 116 aa, Artificial Sequence
  Description of Artificial Sequence: Synthetic polypeptide
  IMP731[LAG-3] variable heavy Chain
QVQLKESGPGLVAPSQSLSITCTVSGFSLTAYGVNWVRQPPGKGLEWLGMIWDDGSTDYNSALKSRLSISKDNSKSQVFLKMNSLQTDDTARYYCAREGDVAFDYWGQGTTLTVSS

SEQ ID NO: 36828 - protein, 5 aa, Artificial Sequence
  Description of Artificial Sequence: Synthetic peptide
  IMP731[LAG-3] vhCDR1
AYGVN

SEQ ID NO: 36829 - protein, 16 aa, Artificial Sequence
  Description of Artificial Sequence: Synthetic peptide
  IMP731[LAG-3] vhCDR2
MIWDDGSTDYNSALKS

SEQ ID NO: 36830 - protein, 8 aa, Artificial Sequence
  Description of Artificial Sequence: Synthetic peptide
  IMP731[LAG-3] vhCDR3
EGDVAFDY

SEQ ID NO: 36831 - protein, 113 aa, Artificial Sequence
  Description of Artificial Sequence: Synthetic polypeptide
  IMP731[LAG-3] variable light Chain
DIVMTQSPSSLAVSVGQKVTMSCKSSQSLLNGSNQKNYLAWYQQKPGQSPKLLVYFASTRDSGVPDRFIGSGSGTDFTLTISSVQAEDLADYFCLQHFGTPPTFGGGTKLEIK

SEQ ID NO: 36832 - protein, 17 aa, Artificial Sequence
  Description of Artificial Sequence: Synthetic peptide
  IMP731[LAG-3] vlCDR1
KSSQSLLNGSNQKNYLA

SEQ ID NO: 36833 - protein, 7 aa, Artificial Sequence
  Description of Artificial Sequence: Synthetic peptide
  IMP731[LAG-3] vlCDR2
FASTRDS

SEQ ID NO: 36834 - protein, 9 aa, Artificial Sequence
  Description of Artificial Sequence: Synthetic peptide
  IMP731[LAG-3] vlCDR3
LQHFGTPPT

SEQ ID NO: 36835 - protein, 123 aa, Artificial Sequence
  Description of Artificial Sequence: Synthetic polypeptide
  13E2[LAG-3] variable heavy Chain
QVTLKESGPGILQPSQTLSLTCSFSGFSLSTSGMGLGWIRQPSGKGLEWLTHIWWDDIKRYNPDLRSRLTISKDTSSSQIFLKIASVDTADTATYYCARIVEGSYSSSYFDVWGAGTTVTVSS

SEQ ID NO: 36836 - protein, 7 aa, Artificial Sequence
  Description of Artificial Sequence: Synthetic peptide
  13E2[LAG-3] vhCDR1
TSGMGLG

SEQ ID NO: 36837 - protein, 16 aa, Artificial Sequence
  Description of Artificial Sequence: Synthetic peptide
  13E2[LAG-3] vhCDR2
HIWWDDIKRYNPDLRS

SEQ ID NO: 36838 - protein, 13 aa, Artificial Sequence
  Description of Artificial Sequence: Synthetic peptide
  13E2[LAG-3] vhCDR3
IVEGSYSSSYFDV

SEQ ID NO: 36839 - protein, 107 aa, Artificial Sequence
  Description of Artificial Sequence: Synthetic polypeptide
  13E2[LAG-3] variable light Chain
DIVMTQPHKFMSTSVEDRVTITCKASQDVIFDVAWYQQKPGQSPKLLIYSASSRVSGVPDRFTGSGSGTDFTFTISSVQAEDLAVYYCQQHYSTPYTFGGGTTLEIK

SEQ ID NO: 36840 - protein, 11 aa, Artificial Sequence
  Description of Artificial Sequence: Synthetic peptide
  13E2[LAG-3] vlCDR1
KASQDVIFDVA

SEQ ID NO: 36841 - protein, 7 aa, Artificial Sequence
  Description of Artificial Sequence: Synthetic peptide
  13E2[LAG-3] vlCDR2
SASSRVS

SEQ ID NO: 36842 - protein, 9 aa, Artificial Sequence
  Description of Artificial Sequence: Synthetic peptide
  13E2[LAG-3] vlCDR3
QQHYSTPYT

SEQ ID NO: 36843 - protein, 123 aa, Artificial Sequence
  Description of Artificial Sequence: Synthetic polypeptide
  34F4[LAG-3] variable heavy Chain
QVTLKESGPGILQPSQTLSLTCSFSGFSLNTSGMGVGWIRQPSGKGLEWLTHIWWDDVKRYNPALKSRLTISKDTSSSQVFLKIASVDTADTATYYCARIEGDTYYDYYFDYWGQGVTLTVSS

SEQ ID NO: 36844 - protein, 7 aa, Artificial Sequence
  Description of Artificial Sequence: Synthetic peptide
  34F4[LAG-3] vhCDR1
TSGMGVG

SEQ ID NO: 36845 - protein, 16 aa, Artificial Sequence
  Description of Artificial Sequence: Synthetic peptide
  34F4[LAG-3] vhCDR2
HIWWDDVKRYNPALKS

SEQ ID NO: 36846 - protein, 13 aa, Artificial Sequence
  Description of Artificial Sequence: Synthetic peptide
  34F4[LAG-3] vhCDR3
IEGDTYYDYYFDY

SEQ ID NO: 36847 - protein, 107 aa, Artificial Sequence
  Description of Artificial Sequence: Synthetic polypeptide
  34F4[LAG-3] variable light Chain
DIVMTQSHKLMSTSVGDGLSITCKASQDVSIAVVWYQQKPGQSPKLLIYSASFRYTGVPDRFTGSGSGTDFTFTISSVQAEDLAVYYCQQHYSIPWTFGGGTKLEIK

SEQ ID NO: 36848 - protein, 11 aa, Artificial Sequence
  Description of Artificial Sequence: Synthetic peptide
  34F4[LAG-3] vlCDR1
KASQDVSIAVV

SEQ ID NO: 36849 - protein, 7 aa, Artificial Sequence
  Description of Artificial Sequence: Synthetic peptide
  34F4[LAG-3] vlCDR2
SASFRYT

SEQ ID NO: 36850 - protein, 9 aa, Artificial Sequence
  Description of Artificial Sequence: Synthetic peptide
  34F4[LAG-3] vlCDR3
QQHYSIPWT

SEQ ID NO: 36851 - protein, 123 aa, Artificial Sequence
  Description of Artificial Sequence: Synthetic polypeptide
  IMP761[LAG-3] variable heavy Chain
QITLKESGPTLVKPTQTLTLTCTFSGFSLSTSGMGLGWIRQPPGKTLEWLTHIWWDDIKRYNPDLRSRLSITKDTSKNQVVLTMTNMDPLDTGTYYCARIVEGSYSSSYFDVWGQGTLVTVSS

SEQ ID NO: 36852 - protein, 7 aa, Artificial Sequence
  Description of Artificial Sequence: Synthetic peptide
  IMP761[LAG-3] vhCDR1
TSGMGLG

SEQ ID NO: 36853 - protein, 16 aa, Artificial Sequence
  Description of Artificial Sequence: Synthetic peptide
  IMP761[LAG-3] vhCDR2
HIWWDDIKRYNPDLRS

SEQ ID NO: 36854 - protein, 13 aa, Artificial Sequence
  Description of Artificial Sequence: Synthetic peptide
  IMP761[LAG-3] vhCDR3
IVEGSYSSSYFDV

SEQ ID NO: 36855 - protein, 107 aa, Artificial Sequence
  Description of Artificial Sequence: Synthetic polypeptide
  IMP761[LAG-3] variable light Chain
DIVMTQTPSSLSASVGDRVTITCKASQDVIFDVAWYQQRPGQAPKLLIYSASSRVSGVPSRFSGSGSGTDFTLTISSLQPEDFATYYCQQHYSTPYTFGQGTRLDIK

SEQ ID NO: 36856 - protein, 11 aa, Artificial Sequence
  Description of Artificial Sequence: Synthetic peptide
  IMP761[LAG-3] vlCDR1
KASQDVIFDVA

SEQ ID NO: 36857 - protein, 7 aa, Artificial Sequence
  Description of Artificial Sequence: Synthetic peptide
  IMP761[LAG-3] vlCDR2
SASSRVS

SEQ ID NO: 36858 - protein, 9 aa, Artificial Sequence
  Description of Artificial Sequence: Synthetic peptide
  IMP761[LAG-3] vlCDR3
QQHYSTPYT

SEQ ID NO: 36859 - protein, 116 aa, Artificial Sequence
  Description of Artificial Sequence: Synthetic polypeptide
  H5L7[LAG-3] variable heavy Chain
QVQLQESGPGLVKPSETLSLTCTVSGFSLTAYGVNWIRQPPGKGLEWIGMIWDDGSTDYDSALKSRVTISVDTSKNQFSLKLSSVTAADTAVYYCAREGDVAFDYWGQGTLVTVSS

SEQ ID NO: 36860 - protein, 5 aa, Artificial Sequence
  Description of Artificial Sequence: Synthetic peptide
  H5L7[LAG-3] vhCDR1
AYGVN

SEQ ID NO: 36861 - protein, 16 aa, Artificial Sequence
  Description of Artificial Sequence: Synthetic peptide
  H5L7[LAG-3] vhCDR2
MIWDDGSTDYDSALKS

SEQ ID NO: 36862 - protein, 8 aa, Artificial Sequence
  Description of Artificial Sequence: Synthetic peptide
  H5L7[LAG-3] vhCDR3
EGDVAFDY

SEQ ID NO: 36863 - protein, 113 aa, Artificial Sequence
  Description of Artificial Sequence: Synthetic polypeptide
  H5L7[LAG-3] variable light Chain
DIQMTQSPSSLSASVGDRVTITCKSSQSLLNPSNQKNYLAWYQQKPGKAPKLLVYFASTRDSGVPSRFSGSGSGTDFTLTISSLQPEDFATYYCLQHFGTPPTFGQGTKLEIK

SEQ ID NO: 36864 - protein, 17 aa, Artificial Sequence
  Description of Artificial Sequence: Synthetic peptide
  H5L7[LAG-3] vlCDR1
KSSQSLLNPSNQKNYLA

SEQ ID NO: 36865 - protein, 7 aa, Artificial Sequence
  Description of Artificial Sequence: Synthetic peptide
  H5L7[LAG-3] vlCDR2
FASTRDS

SEQ ID NO: 36866 - protein, 9 aa, Artificial Sequence
  Description of Artificial Sequence: Synthetic peptide
  H5L7[LAG-3] vlCDR3
LQHFGTPPT

SEQ ID NO: 36867 - protein, 119 aa, Artificial Sequence
  Description of Artificial Sequence: Synthetic polypeptide
  hu22D2[LAG-3] variable heavy Chain
QMQLVQSGPEVKKPGTSVKVSCKASGYTFTDYNVDWVRQARGQRLEWIGDINPNNGGTIYAQKFQERVTITVDKSTSTAYMELSSLRSEDTAVYYCARNYRWFGAMDHWGQGTTVTVSS

SEQ ID NO: 36868 - protein, 5 aa, Artificial Sequence
  Description of Artificial Sequence: Synthetic peptide
  hu22D2[LAG-3] vhCDR1
DYNVD

SEQ ID NO: 36869 - protein, 17 aa, Artificial Sequence
  Description of Artificial Sequence: Synthetic peptide
  hu22D2[LAG-3] vhCDR2
DINPNNGGTIYAQKFQE

SEQ ID NO: 36870 - protein, 10 aa, Artificial Sequence
  Description of Artificial Sequence: Synthetic peptide
  hu22D2[LAG-3] vhCDR3
NYRWFGAMDH

SEQ ID NO: 36871 - protein, 111 aa, Artificial Sequence
  Description of Artificial Sequence: Synthetic polypeptide
  hu22D2[LAG-3] variable light Chain
DIVMTQTPLSLSVTPGQPASISCKASQSLDYEGDSDMNWYLQKPGQPPQLLIYGASNLESGVPDRFSGSGSGTDFTLKISRVEAEDVGVYYCQQSTEDPRTFGGGTKVEIK

SEQ ID NO: 36872 - protein, 15 aa, Artificial Sequence
  Description of Artificial Sequence: Synthetic peptide
  hu22D2[LAG-3] vlCDR1
KASQSLDYEGDSDMN

SEQ ID NO: 36873 - protein, 7 aa, Artificial Sequence
  Description of Artificial Sequence: Synthetic peptide
  hu22D2[LAG-3] vlCDR2
GASNLES

SEQ ID NO: 36874 - protein, 9 aa, Artificial Sequence
  Description of Artificial Sequence: Synthetic peptide
  hu22D2[LAG-3] vlCDR3
QQSTEDPRT

SEQ ID NO: 36875 - protein, 123 aa, Artificial Sequence
  Description of Artificial Sequence: Synthetic polypeptide
  H4sH15482P[LAG-3] variable heavy Chain
QVQLVESGGGVVQPGRSLRLSCVASGFTFSSYGMHWVRQAPGKGLEWVAIIWYDGSNKYYADSVKGRFTISRDNSKNTQYLQMNSLRAEDTAVYYCASVATSGDFDYYGMDVWGQGTTVTVSS

SEQ ID NO: 36876 - protein, 5 aa, Artificial Sequence
  Description of Artificial Sequence: Synthetic peptide
  H4sH15482P[LAG-3] vhCDR1
SYGMH

SEQ ID NO: 36877 - protein, 17 aa, Artificial Sequence
  Description of Artificial Sequence: Synthetic peptide
  H4sH15482P[LAG-3] vhCDR2
IIWYDGSNKYYADSVKG

SEQ ID NO: 36878 - protein, 14 aa, Artificial Sequence
  Description of Artificial Sequence: Synthetic peptide
  H4sH15482P[LAG-3] vhCDR3
VATSGDFDYYGMDV

SEQ ID NO: 36879 - protein, 107 aa, Artificial Sequence
  Description of Artificial Sequence: Synthetic polypeptide
  H4sH15482P[LAG-3] variable light Chain
EIVLTQSPATLSLSPGERTTLSCRASQRISTYLAWYQQKPGQAPRLLIYDASKRATGIPARFSGSGSGTGFTLTISSLEPEDFAVYYCQQRSNWPLTFGGGTKVEIK

SEQ ID NO: 36880 - protein, 11 aa, Artificial Sequence
  Description of Artificial Sequence: Synthetic peptide
  H4sH15482P[LAG-3] vlCDR1
RASQRISTYLA

SEQ ID NO: 36881 - protein, 7 aa, Artificial Sequence
  Description of Artificial Sequence: Synthetic peptide
  H4sH15482P[LAG-3] vlCDR2
DASKRAT

SEQ ID NO: 36882 - protein, 9 aa, Artificial Sequence
  Description of Artificial Sequence: Synthetic peptide
  H4sH15482P[LAG-3] vlCDR3
QQRSNWPLT

SEQ ID NO: 36883 - protein, 119 aa, Artificial Sequence
  Description of Artificial Sequence: Synthetic polypeptide
  L35D4[LAG-3] variable heavy Chain
QVQLVQSGAEVKKPGASVKVSCKASGYTFTSYYMHWVRQAPGQGLEWMGIINPSAGSTSYAQKFQGRVTMTRDTSTSTVYMELSSLRSEDTAVYYCARELMATGGFDYWGQGTLVTVSS

SEQ ID NO: 36884 - protein, 5 aa, Artificial Sequence
  Description of Artificial Sequence: Synthetic peptide
  L35D4[LAG-3] vhCDR1
SYYMH

SEQ ID NO: 36885 - protein, 17 aa, Artificial Sequence
  Description of Artificial Sequence: Synthetic peptide
  L35D4[LAG-3] vhCDR2
IINPSAGSTSYAQKFQG

SEQ ID NO: 36886 - protein, 10 aa, Artificial Sequence
  Description of Artificial Sequence: Synthetic peptide
  L35D4[LAG-3] vhCDR3
ELMATGGFDY

SEQ ID NO: 36887 - protein, 112 aa, Artificial Sequence
  Description of Artificial Sequence: Synthetic polypeptide
  L35D4[LAG-3] variable light Chain
QSVLTQPPSASGSPGQSVTISCTGTSSDVGGYNYVSWYQQYPGKAPRLMIFEVTERASGVPDRFSGSKSGNTASLTVSGLQTEDEAVYFCSSYSGSNNPGAMFGGGTKLTVL

SEQ ID NO: 36888 - protein, 14 aa, Artificial Sequence
  Description of Artificial Sequence: Synthetic peptide
  L35D4[LAG-3] vlCDR1
TGTSSDVGGYNYVS

SEQ ID NO: 36889 - protein, 7 aa, Artificial Sequence
  Description of Artificial Sequence: Synthetic peptide
  L35D4[LAG-3] vlCDR2
EVTERAS

SEQ ID NO: 36890 - protein, 12 aa, Artificial Sequence
  Description of Artificial Sequence: Synthetic peptide
  L35D4[LAG-3] vlCDR3
SSYSGSNNPGAM

SEQ ID NO: 36891 - protein, 119 aa, Artificial Sequence; identical to SEQ ID NO: 36883
  Description of Artificial Sequence: Synthetic polypeptide
  L35G6[LAG-3] variable heavy Chain

SEQ ID NO: 36892 - protein, 5 aa, Artificial Sequence
  Description of Artificial Sequence: Synthetic peptide
  L35G6[LAG-3] vhCDR1
SYYMH

SEQ ID NO: 36893 - protein, 17 aa, Artificial Sequence
  Description of Artificial Sequence: Synthetic peptide
  L35G6[LAG-3] vhCDR2
IINPSAGSTSYAQKFQG

SEQ ID NO: 36894 - protein, 10 aa, Artificial Sequence
  Description of Artificial Sequence: Synthetic peptide
  L35G6[LAG-3] vhCDR3
ELMATGGFDY

SEQ ID NO: 36895 - protein, 110 aa, Artificial Sequence
  Description of Artificial Sequence: Synthetic polypeptide
  L35G6[LAG-3] variable light Chain
QAGLTQPASVSGSPGQSITISCTGSSSDVGGYSYVSWYQKHPGKAPKLMIYDVTNRPSGVSNRFSGSKSGNTASLTISGLQAEDEADYYCSTYTRSNTLVFGPGTKVTVL

SEQ ID NO: 36896 - protein, 14 aa, Artificial Sequence
  Description of Artificial Sequence: Synthetic peptide
  L35G6[LAG-3] vlCDR1
TGSSSDVGGYSYVS

SEQ ID NO: 36897 - protein, 7 aa, Artificial Sequence
  Description of Artificial Sequence: Synthetic peptide
  L35G6[LAG-3] vlCDR2
DVTNRPS

SEQ ID NO: 36898 - protein, 10 aa, Artificial Sequence
  Description of Artificial Sequence: Synthetic peptide
  L35G6[LAG-3] vlCDR3
STYTRSNTLV

SEQ ID NO: 36899 - protein, 119 aa, Artificial Sequence; identical to SEQ ID NO: 36883
  Description of Artificial Sequence: Synthetic polypeptide
  L33H11[LAG-3] variable heavy Chain

SEQ ID NO: 36900 - protein, 5 aa, Artificial Sequence
  Description of Artificial Sequence: Synthetic peptide
  L33H11[LAG-3] vhCDR1
SYYMH

SEQ ID NO: 36901 - protein, 17 aa, Artificial Sequence
  Description of Artificial Sequence: Synthetic peptide
  L33H11[LAG-3] vhCDR2
IINPSAGSTSYAQKFQG

SEQ ID NO: 36902 - protein, 10 aa, Artificial Sequence
  Description of Artificial Sequence: Synthetic peptide
  L33H11[LAG-3] vhCDR3
ELMATGGFDY

SEQ ID NO: 36903 - protein, 110 aa, Artificial Sequence
  Description of Artificial Sequence: Synthetic polypeptide
  L33H11[LAG-3] variable light Chain
LPVLTQPASVSGSPGQSITISCTGTSSDVGGYNYVSWYQQHPGKAPKLMIYDVTNRPSGVSNRFSGSKSGNTASLTISGLQAEDEADYYCSSYTSSNTLLFGGGTQLTVL

SEQ ID NO: 36904 - protein, 14 aa, Artificial Sequence
  Description of Artificial Sequence: Synthetic peptide
  L33H11[LAG-3] vlCDR1
TGTSSDVGGYNYVS

SEQ ID NO: 36905 - protein, 7 aa, Artificial Sequence
  Description of Artificial Sequence: Synthetic peptide
  L33H11[LAG-3] vlCDR2
DVTNRPS

SEQ ID NO: 36906 - protein, 10 aa, Artificial Sequence
  Description of Artificial Sequence: Synthetic peptide
  L33H11[LAG-3] vlCDR3
SSYTSSNTLL

SEQ ID NO: 36907 - protein, 119 aa, Artificial Sequence; identical to SEQ ID NO: 36883
  Description of Artificial Sequence: Synthetic polypeptide
  L32A9[LAG-3] variable heavy Chain

SEQ ID NO: 36908 - protein, 5 aa, Artificial Sequence
  Description of Artificial Sequence: Synthetic peptide
  L32A9[LAG-3] vhCDR1
SYYMH

SEQ ID NO: 36909 - protein, 17 aa, Artificial Sequence
  Description of Artificial Sequence: Synthetic peptide
  L32A9[LAG-3] vhCDR2
IINPSAGSTSYAQKFQG

SEQ ID NO: 36910 - protein, 10 aa, Artificial Sequence
  Description of Artificial Sequence: Synthetic peptide
  L32A9[LAG-3] vhCDR3
ELMATGGFDY

SEQ ID NO: 36911 - protein, 110 aa, Artificial Sequence
  Description of Artificial Sequence: Synthetic polypeptide
  L32A9[LAG-3] variable light Chain
QSVVTQPPSVSAAPGQKVTISCSGSSSNIGNNYVSWYQQLPGTAPKLLIYDNNKRHSGIPDRFSGSTSDTSATLGITRLQTGDEADYYCGTWDSSLSAYVFGTGTKVTVL

SEQ ID NO: 36912 - protein, 13 aa, Artificial Sequence
  Description of Artificial Sequence: Synthetic peptide
  L32A9[LAG-3] vlCDR1
SGSSSNIGNNYVS

SEQ ID NO: 36913 - protein, 7 aa, Artificial Sequence
  Description of Artificial Sequence: Synthetic peptide
  L32A9[LAG-3] vlCDR2
DNNKRHS

SEQ ID NO: 36914 - protein, 11 aa, Artificial Sequence
  Description of Artificial Sequence: Synthetic peptide
  L32A9[LAG-3] vlCDR3
GTWDSSLSAYV

SEQ ID NO: 36915 - protein, 119 aa, Artificial Sequence; identical to SEQ ID NO: 36883
  Description of Artificial Sequence: Synthetic polypeptide
  L32D10[LAG-3] variable heavy Chain

SEQ ID NO: 36916 - protein, 5 aa, Artificial Sequence
  Description of Artificial Sequence: Synthetic peptide
  L32D10[LAG-3] vhCDR1
SYYMH

SEQ ID NO: 36917 - protein, 17 aa, Artificial Sequence
  Description of Artificial Sequence: Synthetic peptide
  L32D10[LAG-3] vhCDR2
IINPSAGSTSYAQKFQG

SEQ ID NO: 36918 - protein, 10 aa, Artificial Sequence
  Description of Artificial Sequence: Synthetic peptide
  L32D10[LAG-3] vhCDR3
ELMATGGFDY

SEQ ID NO: 36919 - protein, 110 aa, Artificial Sequence
  Description of Artificial Sequence: Synthetic polypeptide
  L32D10[LAG-3] variable light Chain
QSVLTQPPSASGSPGQSVTISCTGTSSDVGGYDYVSWYQQHQGKAPKLMIYDVSNRPSGVSNRFSGSKSGNTASLTISGLQAEDEADYYCSSYTSSTTLVFGGGTKLTVL

SEQ ID NO: 36920 - protein, 14 aa, Artificial Sequence
  Description of Artificial Sequence: Synthetic peptide
  L32D10[LAG-3] vlCDR1
TGTSSDVGGYDYVS

SEQ ID NO: 36921 - protein, 7 aa, Artificial Sequence
  Description of Artificial Sequence: Synthetic peptide
  L32D10[LAG-3] vlCDR2
DVSNRPS

SEQ ID NO: 36922 - protein, 10 aa, Artificial Sequence
  Description of Artificial Sequence: Synthetic peptide
  L32D10[LAG-3] vlCDR3
SSYTSSTTLV

SEQ ID NO: 36923 - protein, 119 aa, Artificial Sequence; identical to SEQ ID NO: 36883
  Description of Artificial Sequence: Synthetic polypeptide
  L32A4[LAG-3] variable heavy Chain

SEQ ID NO: 36924 - protein, 5 aa, Artificial Sequence
  Description of Artificial Sequence: Synthetic peptide
  L32A4[LAG-3] vhCDR1
SYYMH

SEQ ID NO: 36925 - protein, 17 aa, Artificial Sequence
  Description of Artificial Sequence: Synthetic peptide
  L32A4[LAG-3] vhCDR2
IINPSAGSTSYAQKFQG

SEQ ID NO: 36926 - protein, 10 aa, Artificial Sequence
  Description of Artificial Sequence: Synthetic peptide
  L32A4[LAG-3] vhCDR3
ELMATGGFDY

SEQ ID NO: 36927 - protein, 110 aa, Artificial Sequence
  Description of Artificial Sequence: Synthetic polypeptide
  L32A4[LAG-3] variable light Chain
QSVLTQPASVSGSPGQSITISCTGTSSDIGAYNFVSWYQQHPGKAPKLMIYGVSNRPSGVSSRFSGSKSGSTASLTISGLQAEDEADYYCSSYTTSGSAVFGTGTKLTVL

SEQ ID NO: 36928 - protein, 14 aa, Artificial Sequence
  Description of Artificial Sequence: Synthetic peptide
  L32A4[LAG-3] vlCDR1
TGTSSDIGAYNFVS

SEQ ID NO: 36929 - protein, 7 aa, Artificial Sequence
  Description of Artificial Sequence: Synthetic peptide
  L32A4[LAG-3] vlCDR2
GVSNRPS

SEQ ID NO: 36930 - protein, 10 aa, Artificial Sequence
  Description of Artificial Sequence: Synthetic peptide
  L32A4[LAG-3] vlCDR3
SSYTTSGSAV

SEQ ID NO: 36931 - protein, 119 aa, Artificial Sequence
  Description of Artificial Sequence: Synthetic polypeptide
  L3A1[LAG-3] variable heavy Chain
EVQLLESGAEVKKPGASVKVSCKASGYTFTSYYMHWVRQAPGQGLEWMGIINPSAGSTSYAQKFQGRVTMTRDTSTSTVYMELSSLRSEDTAVYYCARELMATGGFDYWGQGTLVTVSS

SEQ ID NO: 36932 - protein, 5 aa, Artificial Sequence
  Description of Artificial Sequence: Synthetic peptide
  L3A1[LAG-3] vhCDR1
SYYMH

SEQ ID NO: 36933 - protein, 17 aa, Artificial Sequence
  Description of Artificial Sequence: Synthetic peptide
  L3A1[LAG-3] vhCDR2
IINPSAGSTSYAQKFQG

SEQ ID NO: 36934 - protein, 10 aa, Artificial Sequence
  Description of Artificial Sequence: Synthetic peptide
  L3A1[LAG-3] vhCDR3
ELMATGGFDY

SEQ ID NO: 36935 - protein, 110 aa, Artificial Sequence
  Description of Artificial Sequence: Synthetic polypeptide
  L3A1[LAG-3] variable light Chain
QSVLTQPASVSGSPGQSITISCTGTSSDIGAYNFVSWYQQHPGKAPKLMIYGVSNRPSGVSSRFSGSKSGSTASLTITGLQAEDEADYYCSSYTTSGSAVFGTGTKLTVL

SEQ ID NO: 36936 - protein, 14 aa, Artificial Sequence
  Description of Artificial Sequence: Synthetic peptide
  L3A1[LAG-3] vlCDR1
TGTSSDIGAYNFVS

SEQ ID NO: 36937 - protein, 7 aa, Artificial Sequence
  Description of Artificial Sequence: Synthetic peptide
  L3A1[LAG-3] vlCDR2
GVSNRPS

SEQ ID NO: 36938 - protein, 10 aa, Artificial Sequence
  Description of Artificial Sequence: Synthetic peptide
  L3A1[LAG-3] vlCDR3
SSYTTSGSAV

SEQ ID NO: 36939 - protein, 121 aa, Artificial Sequence
  Description of Artificial Sequence: Synthetic polypeptide
  L3A10[LAG-3] variable heavy Chain
EVQLLESGGGVVQPGRSLRVSCAASGFTFSNHAMHWVRQAPGKGLEWVAVISYDGSKKFYSDSVRGRFTISRDNSKNTLYLQMNSLRPEDTAVYYCAKGAHGYTSGWHDYWGQGTLVTVSS

SEQ ID NO: 36940 - protein, 5 aa, Artificial Sequence
  Description of Artificial Sequence: Synthetic peptide
  L3A10[LAG-3] vhCDR1
NHAMH

SEQ ID NO: 36941 - protein, 17 aa, Artificial Sequence
  Description of Artificial Sequence: Synthetic peptide
  L3A10[LAG-3] vhCDR2
VISYDGSKKFYSDSVRG

SEQ ID NO: 36942 - protein, 12 aa, Artificial Sequence
  Description of Artificial Sequence: Synthetic peptide
  L3A10[LAG-3] vhCDR3
GAHGYTSGWHDY

SEQ ID NO: 36943 - protein, 108 aa, Artificial Sequence
  Description of Artificial Sequence: Synthetic polypeptide
  L3A10[LAG-3] variable light Chain
DVVMTQSPSSLSASVGDRVSITCRASQNIGRYLNWYQQKPGKAPKLLVSAASSLQGGVPSRFSGSGSGTDFTLTISRLQPEDFATYFCQQTYSSPQCTFGQGTKVDIK

SEQ ID NO: 36944 - protein, 11 aa, Artificial Sequence
  Description of Artificial Sequence: Synthetic peptide
  L3A10[LAG-3] vlCDR1
RASQNIGRYLN

SEQ ID NO: 36945 - protein, 7 aa, Artificial Sequence
  Description of Artificial Sequence: Synthetic peptide
  L3A10[LAG-3] vlCDR2
AASSLQG

SEQ ID NO: 36946 - protein, 10 aa, Artificial Sequence
  Description of Artificial Sequence: Synthetic peptide
  L3A10[LAG-3] vlCDR3
QQTYSSPQCT

SEQ ID NO: 36947 - protein, 121 aa, Artificial Sequence
  Description of Artificial Sequence: Synthetic polypeptide
  L3C5[LAG-3] variable heavy Chain
QVQLVQSGSELKKPGASVKVSCKASGYTFTNYYMHWVRQAPGQGLEWMGIINPSGGATNYAQKFQGRVTMTRDTSTSTVYMELSSLRSEDTAVYYCARDSGYDLGYGMDVWGQGTLVTVSS

SEQ ID NO: 36948 - protein, 5 aa, Artificial Sequence
  Description of Artificial Sequence: Synthetic peptide
  L3C5[LAG-3] vhCDR1
NYYMH

SEQ ID NO: 36949 - protein, 17 aa, Artificial Sequence
  Description of Artificial Sequence: Synthetic peptide
  L3C5[LAG-3] vhCDR2
IINPSGGATNYAQKFQG

SEQ ID NO: 36950 - protein, 12 aa, Artificial Sequence
  Description of Artificial Sequence: Synthetic peptide
  L3C5[LAG-3] vhCDR3
DSGYDLGYGMDV

SEQ ID NO: 36951 - protein, 110 aa, Artificial Sequence
  Description of Artificial Sequence: Synthetic polypeptide
  L3C5[LAG-3] variable light Chain
QSVLTQPASVSGSPGQSITISCTGTSSDVGGYNYVSWYQQHPGKAPKLMIYDVSNRPSGASNRFSGSKSGNTASLTISGLQAEDEADYYCSSYTNRNTLLFGGGTKLTVL

SEQ ID NO: 36952 - protein, 14 aa, Artificial Sequence
  Description of Artificial Sequence: Synthetic peptide
  L3C5[LAG-3] vlCDR1
TGTSSDVGGYNYVS

SEQ ID NO: 36953 - protein, 7 aa, Artificial Sequence
  Description of Artificial Sequence: Synthetic peptide
  L3C5[LAG-3] vlCDR2
DVSNRPS

SEQ ID NO: 36954 - protein, 10 aa, Artificial Sequence
  Description of Artificial Sequence: Synthetic peptide
  L3C5[LAG-3] vlCDR3
SSYTNRNTLL

SEQ ID NO: 36955 - protein, 119 aa, Artificial Sequence; identical to SEQ ID NO: 36931
  Description of Artificial Sequence: Synthetic polypeptide
  L3E3[LAG-3] variable heavy Chain

SEQ ID NO: 36956 - protein, 5 aa, Artificial Sequence
  Description of Artificial Sequence: Synthetic peptide
  L3E3[LAG-3] vhCDR1
SYYMH

SEQ ID NO: 36957 - protein, 17 aa, Artificial Sequence
  Description of Artificial Sequence: Synthetic peptide
  L3E3[LAG-3] vhCDR2
IINPSAGSTSYAQKFQG

SEQ ID NO: 36958 - protein, 10 aa, Artificial Sequence
  Description of Artificial Sequence: Synthetic peptide
  L3E3[LAG-3] vhCDR3
ELMATGGFDY

SEQ ID NO: 36959 - protein, 110 aa, Artificial Sequence
  Description of Artificial Sequence: Synthetic polypeptide
  L3E3[LAG-3] variable light Chain
QSVLTQPASASGSPGQSITISCTGTSSDVGGYNYVSWYQQHPGKAPKLMIYDVSNRPSGVSNRFSGSKSGNTASLTISGLQAEDEANYYCSSYTSSSTNVFGTGTKVTVL

SEQ ID NO: 36960 - protein, 14 aa, Artificial Sequence
  Description of Artificial Sequence: Synthetic peptide
  L3E3[LAG-3] vlCDR1
TGTSSDVGGYNYVS

SEQ ID NO: 36961 - protein, 7 aa, Artificial Sequence
  Description of Artificial Sequence: Synthetic peptide
  L3E3[LAG-3] vlCDR2
DVSNRPS

SEQ ID NO: 36962 - protein, 10 aa, Artificial Sequence
  Description of Artificial Sequence: Synthetic peptide
  L3E3[LAG-3] vlCDR3
SSYTSSSTNV

SEQ ID NO: 36963 - protein, 121 aa, Artificial Sequence
  Description of Artificial Sequence: Synthetic polypeptide
  durvalumab[PD-L1] variable heavy Chain
EVQLVESGGGLVQPGGSLRLSCAASGFTFSRYWMSWVRQAPGKGLEWVANIKQDGSEKYYVDSVKGRFTISRDNAKNSLYLQMNSLRAEDTAVYYCAREGGWFGELAFDYWGQGTLVTVSS

SEQ ID NO: 36964 - protein, 5 aa, Artificial Sequence
  Description of Artificial Sequence: Synthetic peptide
  durvalumab[PD-L1] vhCDR1
RYWMS

SEQ ID NO: 36965 - protein, 17 aa, Artificial Sequence
  Description of Artificial Sequence: Synthetic peptide
  durvalumab[PD-L1] vhCDR2
NIKQDGSEKYYVDSVKG

SEQ ID NO: 36966 - protein, 12 aa, Artificial Sequence
  Description of Artificial Sequence: Synthetic peptide
  durvalumab[PD-L1] vhCDR3
EGGWFGELAFDY

SEQ ID NO: 36967 - protein, 108 aa, Artificial Sequence
  Description of Artificial Sequence: Synthetic polypeptide
  durvalumab[PD-L1] variable light Chain
EIVLTQSPGTLSLSPGERATLSCRASQRVSSSYLAWYQQKPGQAPRLLIYDASSRATGIPDRFSGSGSGTDFTLTISRLEPEDFAVYYCQQYGSLPWTFGQGTKVEIK

SEQ ID NO: 36968 - protein, 12 aa, Artificial Sequence
  Description of Artificial Sequence: Synthetic peptide
  durvalumab[PD-L1] vlCDR1
RASQRVSSSYLA

SEQ ID NO: 36969 - protein, 7 aa, Artificial Sequence
  Description of Artificial Sequence: Synthetic peptide
  durvalumab[PD-L1] vlCDR2
DASSRAT

SEQ ID NO: 36970 - protein, 9 aa, Artificial Sequence
  Description of Artificial Sequence: Synthetic peptide
  durvalumab[PD-L1] vlCDR3
QQYGSLPWT

SEQ ID NO: 36971 - protein, 118 aa, Artificial Sequence
  Description of Artificial Sequence: Synthetic polypeptide
  atezolizumab[PD-L1] variable heavy Chain
EVQLVESGGGLVQPGGSLRLSCAASGFTFSDSWIHWVRQAPGKGLEWVAWISPYGGSTYYADSVKGRFTISADTSKNTAYLQMNSLRAEDTAVYYCARRHWPGGFDYWGQGTLVTVSA

SEQ ID NO: 36972 - protein, 5 aa, Artificial Sequence
  Description of Artificial Sequence: Synthetic peptide
  atezolizumab[PD-L1] vhCDR1
DSWIH

SEQ ID NO: 36973 - protein, 17 aa, Artificial Sequence
  Description of Artificial Sequence: Synthetic peptide
  atezolizumab[PD-L1] vhCDR2
WISPYGGSTYYADSVKG

SEQ ID NO: 36974 - protein, 9 aa, Artificial Sequence
  Description of Artificial Sequence: Synthetic peptide
  atezolizumab[PD-L1] vhCDR3
RHWPGGFDY

SEQ ID NO: 36975 - protein, 108 aa, Artificial Sequence
  Description of Artificial Sequence: Synthetic polypeptide
  atezolizumab[PD-L1] variable light Chain
DIQMTQSPSSLSASVGDRVTITCRASQDVSTAVAWYQQKPGKAPKLLIYSASFLYSGVPSRFSGSGSGTDFTLTISSLQPEDFATYYCQQYLYHPATFGQGTKVEIKR

SEQ ID NO: 36976 - protein, 11 aa, Artificial Sequence
  Description of Artificial Sequence: Synthetic peptide
  atezolizumab[PD-L1] vlCDR1
RASQDVSTAVA

SEQ ID NO: 36977 - protein, 7 aa, Artificial Sequence
  Description of Artificial Sequence: Synthetic peptide
  atezolizumab[PD-L1] vlCDR2
SASFLYS

SEQ ID NO: 36978 - protein, 9 aa, Artificial Sequence
  Description of Artificial Sequence: Synthetic peptide
  atezolizumab[PD-L1] vlCDR3
QQYLYHPAT

SEQ ID NO: 36979 - protein, 120 aa, Artificial Sequence
  Description of Artificial Sequence: Synthetic polypeptide
  A09-246-2[PD-L1] variable heavy Chain
EVQLLESGGGLVQPGGSLRLSCAASGFTFSSYIMMWVRQAPGKGLEWVSSIYPSGGITFYADTVKGRFTISRDNSKNTLYLQMNSLRAEDTAVYYCARIKLGTVTTVDYWGQGTLVTVSS

SEQ ID NO: 36980 - protein, 5 aa, Artificial Sequence
  Description of Artificial Sequence: Synthetic peptide
  A09-246-2[PD-L1] vhCDR1
SYIMM

SEQ ID NO: 36981 - protein, 17 aa, Artificial Sequence
  Description of Artificial Sequence: Synthetic peptide
  A09-246-2[PD-L1] vhCDR2
SIYPSGGITFYADTVKG

SEQ ID NO: 36982 - protein, 11 aa, Artificial Sequence
  Description of Artificial Sequence: Synthetic peptide
  A09-246-2[PD-L1] vhCDR3
IKLGTVTTVDY

SEQ ID NO: 36983 - protein, 110 aa, Artificial Sequence
  Description of Artificial Sequence: Synthetic polypeptide
  A09-246-2[PD-L1] variable light Chain
QSALTQPASVSGSPGQSITISCTGTSSDVGGYNYVSWYQQHPGKAPKLMIYDVSNRPSGVSNRFSGSKSGNTASLTISGLQAEDEADYYCSSYTSSSTRVFGTGTKVTVL

SEQ ID NO: 36984 - protein, 14 aa, Artificial Sequence
  Description of Artificial Sequence: Synthetic peptide
  A09-246-2[PD-L1] vlCDR1
TGTSSDVGGYNYVS

SEQ ID NO: 36985 - protein, 7 aa, Artificial Sequence
  Description of Artificial Sequence: Synthetic peptide
  A09-246-2[PD-L1] vlCDR2
DVSNRPS

SEQ ID NO: 36986 - protein, 10 aa, Artificial Sequence
  Description of Artificial Sequence: Synthetic peptide
  A09-246-2[PD-L1] vlCDR3
SSYTSSSTRV

SEQ ID NO: 36987 - protein, 123 aa, Artificial Sequence
  Description of Artificial Sequence: Synthetic polypeptide
  12A4[PD-L1] variable heavy Chain
QVQLVQSGAEVKKPGSSVKVSCKTSGDTFSTYAISWVRQAPGQGLEWMGGIIPIFGKAHYAQKFQGRVTITADESTSTAYMELSSLRSEDTAVYFCARKFHFVSGSPFGMDVWGQGTTVTVSS

SEQ ID NO: 36988 - protein, 5 aa, Artificial Sequence
  Description of Artificial Sequence: Synthetic peptide
  12A4[PD-L1] vhCDR1
TYAIS

SEQ ID NO: 36989 - protein, 17 aa, Artificial Sequence
  Description of Artificial Sequence: Synthetic peptide
  12A4[PD-L1] vhCDR2
GIIPIFGKAHYAQKFQG

SEQ ID NO: 36990 - protein, 14 aa, Artificial Sequence
  Description of Artificial Sequence: Synthetic peptide
  12A4[PD-L1] vhCDR3
KFHFVSGSPFGMDV

SEQ ID NO: 36991 - protein, 106 aa, Artificial Sequence
  Description of Artificial Sequence: Synthetic polypeptide
  12A4[PD-L1] variable light Chain
EIVLTQSPATLSLSPGERATLSCRASQSVSSYLAWYQQKPGQAPRLLIYDASNRATGIPARFSGSGSGTDFTLTISSLEPEDFAVYYCQQRSNWPTFGQGTKVEIK

SEQ ID NO: 36992 - protein, 11 aa, Artificial Sequence
  Description of Artificial Sequence: Synthetic peptide
  12A4[PD-L1] vlCDR1
RASQSVSSYLA

SEQ ID NO: 36993 - protein, 7 aa, Artificial Sequence
  Description of Artificial Sequence: Synthetic peptide
  12A4[PD-L1] vlCDR2
DASNRAT

SEQ ID NO: 36994 - protein, 8 aa, Artificial Sequence
  Description of Artificial Sequence: Synthetic peptide
  12A4[PD-L1] vlCDR3
QQRSNWPT

SEQ ID NO: 36995 - protein, 117 aa, Artificial Sequence
  Description of Artificial Sequence: Synthetic polypeptide
  3G10[PD-L1] variable heavy Chain
QVQLVQSGAEVKKPGASVKVSCKASGYTFTDYGFSWVRQAPGQGLEWMGWITAYNGNTNYAQKLQGRVTMTTDTSTSTVYMELRSLRSDDTAVYYCARDYFYGMDVWGQGTTVTVSS

SEQ ID NO: 36996 - protein, 5 aa, Artificial Sequence
  Description of Artificial Sequence: Synthetic peptide
  3G10[PD-L1] vhCDR1
DYGFS

SEQ ID NO: 36997 - protein, 17 aa, Artificial Sequence
  Description of Artificial Sequence: Synthetic peptide
  3G10[PD-L1] vhCDR2
WITAYNGNTNYAQKLQG

SEQ ID NO: 36998 - protein, 8 aa, Artificial Sequence
  Description of Artificial Sequence: Synthetic peptide
  3G10[PD-L1] vhCDR3
DYFYGMDV

SEQ ID NO: 36999 - protein, 107 aa, Artificial Sequence
  Description of Artificial Sequence: Synthetic polypeptide
  3G10[PD-L1] variable light Chain
EIVLTQSPATLSLSPGERATLSCRASQSVSSYLVWYQQKPGQAPRLLIYDASNRATGIPARFSGSGSGTDFTLTISSLEPEDFAVYYCQQRSNWPRTFGQGTKVEIK

SEQ ID NO: 37000 - protein, 11 aa, Artificial Sequence
  Description of Artificial Sequence: Synthetic peptide
  3G10[PD-L1] vlCDR1
RASQSVSSYLV

SEQ ID NO: 37001 - protein, 7 aa, Artificial Sequence
  Description of Artificial Sequence: Synthetic peptide
  3G10[PD-L1] vlCDR2
DASNRAT

SEQ ID NO: 37002 - protein, 9 aa, Artificial Sequence
  Description of Artificial Sequence: Synthetic peptide
  3G10[PD-L1] vlCDR3
QQRSNWPRT

SEQ ID NO: 37003 - protein, 118 aa, Artificial Sequence
  Description of Artificial Sequence: Synthetic polypeptide
  10A5[PD-L1] variable heavy Chain
QVQLVQSGAEVKKPGASVKVSCKASGYTFTSYDVHWVRQAPGQRLEWMGWLHADTGITKFSQKFQGRVTITRDTSASTAYMELSSLRSEDTAVYYCARERIQLWFDYWGQGTLVTVSS

SEQ ID NO: 37004 - protein, 5 aa, Artificial Sequence
  Description of Artificial Sequence: Synthetic peptide
  10A5[PD-L1] vhCDR1
SYDVH

SEQ ID NO: 37005 - protein, 17 aa, Artificial Sequence
  Description of Artificial Sequence: Synthetic peptide
  10A5[PD-L1] vhCDR2
WLHADTGITKFSQKFQG

SEQ ID NO: 37006 - protein, 9 aa, Artificial Sequence
  Description of Artificial Sequence: Synthetic peptide
  10A5[PD-L1] vhCDR3
ERIQLWFDY

SEQ ID NO: 37007 - protein, 107 aa, Artificial Sequence
  Description of Artificial Sequence: Synthetic polypeptide
  10A5[PD-L1] variable light Chain
DIQMTQSPSSLSASVGDRVTITCRASQGISSWLAWYQQKPEKAPKSLIYAASSLQSGVPSRFSGSGSGTDFTLTISSLQPEDFATYYCQQYNSYPYTFGQGTKLEIK

SEQ ID NO: 37008 - protein, 11 aa, Artificial Sequence
  Description of Artificial Sequence: Synthetic peptide
  10A5[PD-L1] vlCDR1
RASQGISSWLA

SEQ ID NO: 37009 - protein, 7 aa, Artificial Sequence
  Description of Artificial Sequence: Synthetic peptide
  10A5[PD-L1] vlCDR2
AASSLQS

SEQ ID NO: 37010 - protein, 9 aa, Artificial Sequence
  Description of Artificial Sequence: Synthetic peptide
  10A5[PD-L1] vlCDR3
QQYNSYPYT

SEQ ID NO: 37011 - protein, 114 aa, Artificial Sequence
  Description of Artificial Sequence: Synthetic polypeptide
  h3D10 Var 1[PD-L1] variable heavy Chain
QVQLVQSGAEVKKPGASVKVSCKASGYTFPDYYMNWVRQAPGQGLEWMGDIDPNYGGTNYAQKFQGRVTMTRDTSISTAYMELSRLRSDDTAVYYCARGALTDWGQGTMVTVSS

SEQ ID NO: 37012 - protein, 5 aa, Artificial Sequence
  Description of Artificial Sequence: Synthetic peptide
  h3D10 Var 1[PD-L1] vhCDR1
DYYMN

SEQ ID NO: 37013 - protein, 17 aa, Artificial Sequence
  Description of Artificial Sequence: Synthetic peptide
  h3D10 Var 1[PD-L1] vhCDR2
DIDPNYGGTNYAQKFQG

SEQ ID NO: 37014 - protein, 5 aa, Artificial Sequence
  Description of Artificial Sequence: Synthetic peptide
  h3D10 Var 1[PD-L1] vhCDR3
GALTD

SEQ ID NO: 37015 - protein, 106 aa, Artificial Sequence
  Description of Artificial Sequence: Synthetic polypeptide
  h3D10 Var 1[PD-L1] variable light Chain
EIVLTQSPATLSLSPGERATLSCRASSSVSYIYWFQQKPGQAPRLLIYAAFNRATGIPARFSGSGSGTDYTLTISSLEPEDFAVYYCQQWSNNPLTFGQGTKVEIK

SEQ ID NO: 37016 - protein, 10 aa, Artificial Sequence
  Description of Artificial Sequence: Synthetic peptide
  h3D10 Var 1[PD-L1] vlCDR1
RASSSVSYIY

SEQ ID NO: 37017 - protein, 7 aa, Artificial Sequence
  Description of Artificial Sequence: Synthetic peptide
  h3D10 Var 1[PD-L1] vlCDR2
AAFNRAT

SEQ ID NO: 37018 - protein, 9 aa, Artificial Sequence
  Description of Artificial Sequence: Synthetic peptide
  h3D10 Var 1[PD-L1] vlCDR3
QQWSNNPLT

SEQ ID NO: 37019 - protein, 114 aa, Artificial Sequence
  Description of Artificial Sequence: Synthetic polypeptide
  h3D10 Var 2[PD-L1] variable heavy Chain
QVQLVQSGAEVKKPGASVKVSCKASGYTFPDYYMNWVRQAPGQSLEWMGDIDPNYGGTNYNQKFQGRVTMTRDTSISTAYMELSRLRSDDTAVYYCARGALTDWGQGTMVTVSS

SEQ ID NO: 37020 - protein, 5 aa, Artificial Sequence
  Description of Artificial Sequence: Synthetic peptide
  h3D10 Var 2[PD-L1] vhCDR1
DYYMN

SEQ ID NO: 37021 - protein, 17 aa, Artificial Sequence
  Description of Artificial Sequence: Synthetic peptide
  h3D10 Var 2[PD-L1] vhCDR2
DIDPNYGGTNYNQKFQG

SEQ ID NO: 37022 - protein, 5 aa, Artificial Sequence
  Description of Artificial Sequence: Synthetic peptide
  h3D10 Var 2[PD-L1] vhCDR3
GALTD

SEQ ID NO: 37023 - protein, 106 aa, Artificial Sequence
  Description of Artificial Sequence: Synthetic polypeptide
  h3D10 Var 2[PD-L1] variable light Chain
EIVLTQSPATLSLSPGERATLSCRASSSVSYIYWFQQKPGQSPRPLIYAAFNRATGIPARFSGSGSGTDYTLTISSLEPEDFAVYYCQQWSNNPLTFGQGTKVEIK

SEQ ID NO: 37024 - protein, 10 aa, Artificial Sequence
  Description of Artificial Sequence: Synthetic peptide
  h3D10 Var 2[PD-L1] vlCDR1
RASSSVSYIY

SEQ ID NO: 37025 - protein, 7 aa, Artificial Sequence
  Description of Artificial Sequence: Synthetic peptide
  h3D10 Var 2[PD-L1] vlCDR2
AAFNRAT

SEQ ID NO: 37026 - protein, 9 aa, Artificial Sequence
  Description of Artificial Sequence: Synthetic peptide
  h3D10 Var 2[PD-L1] vlCDR3
QQWSNNPLT

SEQ ID NO: 37027 - protein, 114 aa, Artificial Sequence; identical to SEQ ID NO: 37019
  Description of Artificial Sequence: Synthetic polypeptide
  h3D10 Var 3[PD-L1] variable heavy Chain

SEQ ID NO: 37028 - protein, 5 aa, Artificial Sequence
  Description of Artificial Sequence: Synthetic peptide
  h3D10 Var 3[PD-L1] vhCDR1
DYYMN

SEQ ID NO: 37029 - protein, 17 aa, Artificial Sequence
  Description of Artificial Sequence: Synthetic peptide
  h3D10 Var 3[PD-L1] vhCDR2
DIDPNYGGTNYNQKFQG

SEQ ID NO: 37030 - protein, 5 aa, Artificial Sequence
  Description of Artificial Sequence: Synthetic peptide
  h3D10 Var 3[PD-L1] vhCDR3
GALTD

SEQ ID NO: 37031 - protein, 106 aa, Artificial Sequence
  Description of Artificial Sequence: Synthetic polypeptide
  h3D10 Var 3[PD-L1] variable light Chain
QIVLTQSPATLSLSPGERATLSCRASSSVSYIYWFQQKPGQSPRPLIYATFNLASGIPARFSGSGSGTSYTLTISRLEPEDFAVYYCQQWSNNPLTFGQGTKVEIK

SEQ ID NO: 37032 - protein, 10 aa, Artificial Sequence
  Description of Artificial Sequence: Synthetic peptide
  h3D10 Var 3[PD-L1] vlCDR1
RASSSVSYIY

SEQ ID NO: 37033 - protein, 7 aa, Artificial Sequence
  Description of Artificial Sequence: Synthetic peptide
  h3D10 Var 3[PD-L1] vlCDR2
ATFNLAS

SEQ ID NO: 37034 - protein, 9 aa, Artificial Sequence
  Description of Artificial Sequence: Synthetic peptide
  h3D10 Var 3[PD-L1] vlCDR3
QQWSNNPLT

SEQ ID NO: 37035 - protein, 114 aa, Artificial Sequence
  Description of Artificial Sequence: Synthetic polypeptide
  h3D10 Var 4[PD-L1] variable heavy Chain
EVQLVQSGAEVKKPGASVKVSCKASGYTFPDYYMNWVRQAPGQSLEWMGDIDPNYGGTNYNQKFQGRVTMTVDRSSSTAYMELSRLRSDDTAVYYCARGALTDWGQGTMVTVSS

SEQ ID NO: 37036 - protein, 5 aa, Artificial Sequence
  Description of Artificial Sequence: Synthetic peptide
  h3D10 Var 4[PD-L1] vhCDR1
DYYMN

SEQ ID NO: 37037 - protein, 17 aa, Artificial Sequence
  Description of Artificial Sequence: Synthetic peptide
  h3D10 Var 4[PD-L1] vhCDR2
DIDPNYGGTNYNQKFQG

SEQ ID NO: 37038 - protein, 5 aa, Artificial Sequence
  Description of Artificial Sequence: Synthetic peptide
  h3D10 Var 4[PD-L1] vhCDR3
GALTD

SEQ ID NO: 37039 - protein, 106 aa, Artificial Sequence; identical to SEQ ID NO: 37023
  Description of Artificial Sequence: Synthetic polypeptide
  h3D10 Var 4[PD-L1] variable light Chain

SEQ ID NO: 37040 - protein, 10 aa, Artificial Sequence
  Description of Artificial Sequence: Synthetic peptide
  h3D10 Var 4[PD-L1] vlCDR1
RASSSVSYIY

SEQ ID NO: 37041 - protein, 7 aa, Artificial Sequence
  Description of Artificial Sequence: Synthetic peptide
  h3D10 Var 4[PD-L1] vlCDR2
AAFNRAT

SEQ ID NO: 37042 - protein, 9 aa, Artificial Sequence
  Description of Artificial Sequence: Synthetic peptide
  h3D10 Var 4[PD-L1] vlCDR3
QQWSNNPLT

SEQ ID NO: 37043 - protein, 114 aa, Artificial Sequence; identical to SEQ ID NO: 37035
  Description of Artificial Sequence: Synthetic polypeptide
  h3D10 Var 5[PD-L1] variable heavy Chain

SEQ ID NO: 37044 - protein, 5 aa, Artificial Sequence
  Description of Artificial Sequence: Synthetic peptide
  h3D10 Var 5[PD-L1] vhCDR1
DYYMN

SEQ ID NO: 37045 - protein, 17 aa, Artificial Sequence
  Description of Artificial Sequence: Synthetic peptide
  h3D10 Var 5[PD-L1] vhCDR2
DIDPNYGGTNYNQKFQG

SEQ ID NO: 37046 - protein, 5 aa, Artificial Sequence
  Description of Artificial Sequence: Synthetic peptide
  h3D10 Var 5[PD-L1] vhCDR3
GALTD

SEQ ID NO: 37047 - protein, 106 aa, Artificial Sequence; identical to SEQ ID NO: 37031
  Description of Artificial Sequence: Synthetic polypeptide
  h3D10 Var 5[PD-L1] variable light Chain

SEQ ID NO: 37048 - protein, 10 aa, Artificial Sequence
  Description of Artificial Sequence: Synthetic peptide
  h3D10 Var 5[PD-L1] vlCDR1
RASSSVSYIY

SEQ ID NO: 37049 - protein, 7 aa, Artificial Sequence
  Description of Artificial Sequence: Synthetic peptide
  h3D10 Var 5[PD-L1] vlCDR2
ATFNLAS

SEQ ID NO: 37050 - protein, 9 aa, Artificial Sequence
  Description of Artificial Sequence: Synthetic peptide
  h3D10 Var 5[PD-L1] vlCDR3
QQWSNNPLT

SEQ ID NO: 37051 - protein, 114 aa, Artificial Sequence
  Description of Artificial Sequence: Synthetic polypeptide
  h3D10 Var 6[PD-L1] variable heavy Chain
EVQLVESGGGLVQPGRSLRLSCTASGYTFPDYYMNWVRQAPGKGLEWVGDIDPNYGGTTYAASVKGRFTISVDRSKSIAYLQMSSLKTEDTAVYYCTRGALTDWGQGTMVTVSS

SEQ ID NO: 37052 - protein, 5 aa, Artificial Sequence
  Description of Artificial Sequence: Synthetic peptide
  h3D10 Var 6[PD-L1] vhCDR1
DYYMN

SEQ ID NO: 37053 - protein, 17 aa, Artificial Sequence
  Description of Artificial Sequence: Synthetic peptide
  h3D10 Var 6[PD-L1] vhCDR2
DIDPNYGGTTYAASVKG

SEQ ID NO: 37054 - protein, 5 aa, Artificial Sequence
  Description of Artificial Sequence: Synthetic peptide
  h3D10 Var 6[PD-L1] vhCDR3
GALTD

SEQ ID NO: 37055 - protein, 106 aa, Artificial Sequence
  Description of Artificial Sequence: Synthetic polypeptide
  h3D10 Var 6[PD-L1] variable light Chain
DIQLTQSPSSLSASVGDRVTITCRASSGVSYIYWFQQKPGKAPKLLIYAAFNLASGVPSRFSGSGSGTEYTLTISSLQPEDFATYYCQQWSNNPLTFGQGTKVEIK

SEQ ID NO: 37056 - protein, 10 aa, Artificial Sequence
  Description of Artificial Sequence: Synthetic peptide
  h3D10 Var 6[PD-L1] vlCDR1
RASSGVSYIY

SEQ ID NO: 37057 - protein, 7 aa, Artificial Sequence
  Description of Artificial Sequence: Synthetic peptide
  h3D10 Var 6[PD-L1] vlCDR2
AAFNLAS

SEQ ID NO: 37058 - protein, 9 aa, Artificial Sequence
  Description of Artificial Sequence: Synthetic peptide
  h3D10 Var 6[PD-L1] vlCDR3
QQWSNNPLT

SEQ ID NO: 37059 - protein, 114 aa, Artificial Sequence
  Description of Artificial Sequence: Synthetic polypeptide
  h3D10 Var 7[PD-L1] variable heavy Chain
EVQLVESGGGLVQPGRSLRLSCTASGYTFPDYYMNWVRQAPGKGLEWVGDIDPNYGGTTYNASVKGRFTISVDRSKSIAYLQMSSLKTEDTAVYYCARGALTDWGQGTMVTVSS

SEQ ID NO: 37060 - protein, 5 aa, Artificial Sequence
  Description of Artificial Sequence: Synthetic peptide
  h3D10 Var 7[PD-L1] vhCDR1
DYYMN

SEQ ID NO: 37061 - protein, 17 aa, Artificial Sequence
  Description of Artificial Sequence: Synthetic peptide
  h3D10 Var 7[PD-L1] vhCDR2
DIDPNYGGTTYNASVKG

SEQ ID NO: 37062 - protein, 5 aa, Artificial Sequence
  Description of Artificial Sequence: Synthetic peptide
  h3D10 Var 7[PD-L1] vhCDR3
GALTD

SEQ ID NO: 37063 - protein, 106 aa, Artificial Sequence
  Description of Artificial Sequence: Synthetic polypeptide
  h3D10 Var 7[PD-L1] variable light Chain
DIQLTQSPSSLSASVGDRVTITCRASSGVSYIYWFQQKPGKAPKPLIYAAFNLASGVPSRFSGSGSGTEYTLTISSLQPEDFATYYCQQWSNNPLTFGQGTKVEIK

SEQ ID NO: 37064 - protein, 10 aa, Artificial Sequence
  Description of Artificial Sequence: Synthetic peptide
  h3D10 Var 7[PD-L1] vlCDR1
RASSGVSYIY

SEQ ID NO: 37065 - protein, 7 aa, Artificial Sequence
  Description of Artificial Sequence: Synthetic peptide
  h3D10 Var 7[PD-L1] vlCDR2
AAFNLAS

SEQ ID NO: 37066 - protein, 9 aa, Artificial Sequence
  Description of Artificial Sequence: Synthetic peptide
  h3D10 Var 7[PD-L1] vlCDR3
QQWSNNPLT

SEQ ID NO: 37067 - protein, 114 aa, Artificial Sequence; identical to SEQ ID NO: 37059
  Description of Artificial Sequence: Synthetic polypeptide
  h3D10 Var 8[PD-L1] variable heavy Chain

SEQ ID NO: 37068 - protein, 5 aa, Artificial Sequence
  Description of Artificial Sequence: Synthetic peptide
  h3D10 Var 8[PD-L1] vhCDR1
DYYMN

SEQ ID NO: 37069 - protein, 17 aa, Artificial Sequence
  Description of Artificial Sequence: Synthetic peptide
  h3D10 Var 8[PD-L1] vhCDR2
DIDPNYGGTTYNASVKG

SEQ ID NO: 37070 - protein, 5 aa, Artificial Sequence
  Description of Artificial Sequence: Synthetic peptide
  h3D10 Var 8[PD-L1] vhCDR3
GALTD

SEQ ID NO: 37071 - protein, 106 aa, Artificial Sequence
  Description of Artificial Sequence: Synthetic polypeptide
  h3D10 Var 8[PD-L1] variable light Chain
DIQLTQSPSILSASVGDRVTITCRASSSVSYIYWFQQKPGKAPKPLIYATFNLASGVPSRFSGSGSGTSYTLTISSLQPEDFATYYCQQWSNNPLTFGQGTKVEIK

SEQ ID NO: 37072 - protein, 10 aa, Artificial Sequence
  Description of Artificial Sequence: Synthetic peptide
  h3D10 Var 8[PD-L1] vlCDR1
RASSSVSYIY

SEQ ID NO: 37073 - protein, 7 aa, Artificial Sequence
  Description of Artificial Sequence: Synthetic peptide
  h3D10 Var 8[PD-L1] vlCDR2
ATFNLAS

SEQ ID NO: 37074 - protein, 9 aa, Artificial Sequence
  Description of Artificial Sequence: Synthetic peptide
  h3D10 Var 8[PD-L1] vlCDR3
QQWSNNPLT

SEQ ID NO: 37075 - protein, 114 aa, Artificial Sequence
  Description of Artificial Sequence: Synthetic polypeptide
  h3D10 Var 9[PD-L1] variable heavy Chain
EVQLVESGGGLVQPGRSLRLSCTASGYTFPDYYMNWVRQAPGKGLEWVGDIDPNYGGTTYNQSVKGRFTISVDRSKSIAYLQMSSLKTEDTAVYYCARGALTDWGQGTMVTVSS

SEQ ID NO: 37076 - protein, 5 aa, Artificial Sequence
  Description of Artificial Sequence: Synthetic peptide
  h3D10 Var 9[PD-L1] vhCDR1
DYYMN

SEQ ID NO: 37077 - protein, 17 aa, Artificial Sequence
  Description of Artificial Sequence: Synthetic peptide
  h3D10 Var 9[PD-L1] vhCDR2
DIDPNYGGTTYNQSVKG

SEQ ID NO: 37078 - protein, 5 aa, Artificial Sequence
  Description of Artificial Sequence: Synthetic peptide
  h3D10 Var 9[PD-L1] vhCDR3
GALTD

SEQ ID NO: 37079 - protein, 106 aa, Artificial Sequence; identical to SEQ ID NO: 37063
  Description of Artificial Sequence: Synthetic polypeptide
  h3D10 Var 9[PD-L1] variable light Chain

SEQ ID NO: 37080 - protein, 10 aa, Artificial Sequence
  Description of Artificial Sequence: Synthetic peptide
  h3D10 Var 9[PD-L1] vlCDR1
RASSGVSYIY

SEQ ID NO: 37081 - protein, 7 aa, Artificial Sequence
  Description of Artificial Sequence: Synthetic peptide
  h3D10 Var 9[PD-L1] vlCDR2
AAFNLAS

SEQ ID NO: 37082 - protein, 9 aa, Artificial Sequence
  Description of Artificial Sequence: Synthetic peptide
  h3D10 Var 9[PD-L1] vlCDR3
QQWSNNPLT

SEQ ID NO: 37083 - protein, 114 aa, Artificial Sequence; identical to SEQ ID NO: 37075
  Description of Artificial Sequence: Synthetic polypeptide
  h3D10 Var 10[PD-L1] variable heavy Chain

SEQ ID NO: 37084 - protein, 5 aa, Artificial Sequence
  Description of Artificial Sequence: Synthetic peptide
  h3D10 Var 10[PD-L1] vhCDR1
DYYMN

SEQ ID NO: 37085 - protein, 17 aa, Artificial Sequence
  Description of Artificial Sequence: Synthetic peptide
  h3D10 Var 10[PD-L1] vhCDR2
DIDPNYGGTTYNQSVKG

SEQ ID NO: 37086 - protein, 5 aa, Artificial Sequence
  Description of Artificial Sequence: Synthetic peptide
  h3D10 Var 10[PD-L1] vhCDR3
GALTD

SEQ ID NO: 37087 - protein, 106 aa, Artificial Sequence; identical to SEQ ID NO: 37071
  Description of Artificial Sequence: Synthetic polypeptide
  h3D10 Var 10[PD-L1] variable light Chain

SEQ ID NO: 37088 - protein, 10 aa, Artificial Sequence
  Description of Artificial Sequence: Synthetic peptide
  h3D10 Var 10[PD-L1] vlCDR1
RASSSVSYIY

SEQ ID NO: 37089 - protein, 7 aa, Artificial Sequence
  Description of Artificial Sequence: Synthetic peptide
  h3D10 Var 10[PD-L1] vlCDR2
ATFNLAS

SEQ ID NO: 37090 - protein, 9 aa, Artificial Sequence
  Description of Artificial Sequence: Synthetic peptide
  h3D10 Var 10[PD-L1] vlCDR3
QQWSNNPLT

SEQ ID NO: 37091 - protein, 114 aa, Artificial Sequence; identical to SEQ ID NO: 37051
  Description of Artificial Sequence: Synthetic polypeptide
  h3D10 Var 11[PD-L1] variable heavy Chain

SEQ ID NO: 37092 - protein, 5 aa, Artificial Sequence
  Description of Artificial Sequence: Synthetic peptide
  h3D10 Var 11[PD-L1] vhCDR1
DYYMN

SEQ ID NO: 37093 - protein, 17 aa, Artificial Sequence
  Description of Artificial Sequence: Synthetic peptide
  h3D10 Var 11[PD-L1] vhCDR2
DIDPNYGGTTYAASVKG

SEQ ID NO: 37094 - protein, 5 aa, Artificial Sequence
  Description of Artificial Sequence: Synthetic peptide
  h3D10 Var 11[PD-L1] vhCDR3
GALTD

SEQ ID NO: 37095 - protein, 106 aa, Artificial Sequence; identical to SEQ ID NO: 37015
  Description of Artificial Sequence: Synthetic polypeptide
  h3D10 Var 11[PD-L1] variable light Chain

SEQ ID NO: 37096 - protein, 10 aa, Artificial Sequence
  Description of Artificial Sequence: Synthetic peptide
  h3D10 Var 11[PD-L1] vlCDR1
RASSSVSYIY

SEQ ID NO: 37097 - protein, 7 aa, Artificial Sequence
  Description of Artificial Sequence: Synthetic peptide
  h3D10 Var 11[PD-L1] vlCDR2
AAFNRAT

SEQ ID NO: 37098 - protein, 9 aa, Artificial Sequence
  Description of Artificial Sequence: Synthetic peptide
  h3D10 Var 11[PD-L1] vlCDR3
QQWSNNPLT

SEQ ID NO: 37099 - protein, 114 aa, Artificial Sequence; identical to SEQ ID NO: 37011
  Description of Artificial Sequence: Synthetic polypeptide
  h3D10 Var 12[PD-L1] variable heavy Chain

SEQ ID NO: 37100 - protein, 5 aa, Artificial Sequence
  Description of Artificial Sequence: Synthetic peptide
  h3D10 Var 12[PD-L1] vhCDR1
DYYMN

SEQ ID NO: 37101 - protein, 17 aa, Artificial Sequence
  Description of Artificial Sequence: Synthetic peptide
  h3D10 Var 12[PD-L1] vhCDR2
DIDPNYGGTNYAQKFQG

SEQ ID NO: 37102 - protein, 5 aa, Artificial Sequence
  Description of Artificial Sequence: Synthetic peptide
  h3D10 Var 12[PD-L1] vhCDR3
GALTD

SEQ ID NO: 37103 - protein, 106 aa, Artificial Sequence; identical to SEQ ID NO: 37055
  Description of Artificial Sequence: Synthetic polypeptide
  h3D10 Var 12[PD-L1] variable light Chain

SEQ ID NO: 37104 - protein, 10 aa, Artificial Sequence
  Description of Artificial Sequence: Synthetic peptide
  h3D10 Var 12[PD-L1] vlCDR1
RASSGVSYIY

SEQ ID NO: 37105 - protein, 7 aa, Artificial Sequence
  Description of Artificial Sequence: Synthetic peptide
  h3D10 Var 12[PD-L1] vlCDR2
AAFNLAS

SEQ ID NO: 37106 - protein, 9 aa, Artificial Sequence
  Description of Artificial Sequence: Synthetic peptide
  h3D10 Var 12[PD-L1] vlCDR3
QQWSNNPLT

SEQ ID NO: 37107 - protein, 114 aa, Artificial Sequence; identical to SEQ ID NO: 37075
  Description of Artificial Sequence: Synthetic polypeptide
  h3D10 Var 13[PD-L1] variable heavy Chain

SEQ ID NO: 37108 - protein, 5 aa, Artificial Sequence
  Description of Artificial Sequence: Synthetic peptide
  h3D10 Var 13[PD-L1] vhCDR1
DYYMN

SEQ ID NO: 37109 - protein, 17 aa, Artificial Sequence
  Description of Artificial Sequence: Synthetic peptide
  h3D10 Var 13[PD-L1] vhCDR2
DIDPNYGGTTYNQSVKG

SEQ ID NO: 37110 - protein, 5 aa, Artificial Sequence
  Description of Artificial Sequence: Synthetic peptide
  h3D10 Var 13[PD-L1] vhCDR3
GALTD

SEQ ID NO: 37111 - protein, 106 aa, Artificial Sequence; identical to SEQ ID NO: 37031
  Description of Artificial Sequence: Synthetic polypeptide
  h3D10 Var 13[PD-L1] variable light Chain

SEQ ID NO: 37112 - protein, 10 aa, Artificial Sequence
  Description of Artificial Sequence: Synthetic peptide
  h3D10 Var 13[PD-L1] vlCDR1
RASSSVSYIY

SEQ ID NO: 37113 - protein, 7 aa, Artificial Sequence
  Description of Artificial Sequence: Synthetic peptide
  h3D10 Var 13[PD-L1] vlCDR2
ATFNLAS

SEQ ID NO: 37114 - protein, 9 aa, Artificial Sequence
  Description of Artificial Sequence: Synthetic peptide
  h3D10 Var 13[PD-L1] vlCDR3
QQWSNNPLT

SEQ ID NO: 37115 - protein, 114 aa, Artificial Sequence; identical to SEQ ID NO: 37035
  Description of Artificial Sequence: Synthetic polypeptide
  h3D10 Var 14[PD-L1] variable heavy Chain

SEQ ID NO: 37116 - protein, 5 aa, Artificial Sequence
  Description of Artificial Sequence: Synthetic peptide
  h3D10 Var 14[PD-L1] vhCDR1
DYYMN

SEQ ID NO: 37117 - protein, 17 aa, Artificial Sequence
  Description of Artificial Sequence: Synthetic peptide
  h3D10 Var 14[PD-L1] vhCDR2
DIDPNYGGTNYNQKFQG

SEQ ID NO: 37118 - protein, 5 aa, Artificial Sequence
  Description of Artificial Sequence: Synthetic peptide
  h3D10 Var 14[PD-L1] vhCDR3
GALTD

SEQ ID NO: 37119 - protein, 106 aa, Artificial Sequence; identical to SEQ ID NO: 37071
  Description of Artificial Sequence: Synthetic polypeptide
  h3D10 Var 14[PD-L1] variable light Chain

SEQ ID NO: 37120 - protein, 10 aa, Artificial Sequence
  Description of Artificial Sequence: Synthetic peptide
  h3D10 Var 14[PD-L1] vlCDR1
RASSSVSYIY

SEQ ID NO: 37121 - protein, 7 aa, Artificial Sequence
  Description of Artificial Sequence: Synthetic peptide
  h3D10 Var 14[PD-L1] vlCDR2
ATFNLAS

SEQ ID NO: 37122 - protein, 9 aa, Artificial Sequence
  Description of Artificial Sequence: Synthetic peptide
  h3D10 Var 14[PD-L1] vlCDR3
QQWSNNPLT

SEQ ID NO: 37123 - protein, 123 aa, Artificial Sequence
  Description of Artificial Sequence: Synthetic polypeptide
  Antibody A[PD-L1] variable heavy Chain
QVQLVQSGAEVKKPGSSVKVSCKASGGTFSSYAISWVRQAPGQGLEWMGGIIPIFGTANYAQKFQGRVTITADKSTSTAYMELSSLRSEDTAVYYCARSPDYSPYYYYGMDVWGQGTTVTVSS

SEQ ID NO: 37124 - protein, 5 aa, Artificial Sequence
  Description of Artificial Sequence: Synthetic peptide
  Antibody A[PD-L1] vhCDR1
SYAIS

SEQ ID NO: 37125 - protein, 17 aa, Artificial Sequence
  Description of Artificial Sequence: Synthetic peptide
  Antibody A[PD-L1] vhCDR2
GIIPIFGTANYAQKFQG

SEQ ID NO: 37126 - protein, 14 aa, Artificial Sequence
  Description of Artificial Sequence: Synthetic peptide
  Antibody A[PD-L1] vhCDR3
SPDYSPYYYYGMDV

SEQ ID NO: 37127 - protein, 111 aa, Artificial Sequence
  Description of Artificial Sequence: Synthetic polypeptide
  Antibody A[PD-L1] variable light Chain
QSVLTQPPSASGTPGQRVTISCSGSSSNIGSNTVNWYQQLPGTAPKLLIYGNSNRPSGVPDRFSGSKSGTSASLAISGLQSEDEADYYCQSYDSSLSGSVFGGGIKLTVLG

SEQ ID NO: 37128 - protein, 13 aa, Artificial Sequence
  Description of Artificial Sequence: Synthetic peptide
  Antibody A[PD-L1] vlCDR1
SGSSSNIGSNTVN

SEQ ID NO: 37129 - protein, 7 aa, Artificial Sequence
  Description of Artificial Sequence: Synthetic peptide
  Antibody A[PD-L1] vlCDR2
GNSNRPS

SEQ ID NO: 37130 - protein, 11 aa, Artificial Sequence
  Description of Artificial Sequence: Synthetic peptide
  Antibody A[PD-L1] vlCDR3
QSYDSSLSGSV

SEQ ID NO: 37131 - protein, 116 aa, Artificial Sequence
  Description of Artificial Sequence: Synthetic polypeptide
  C5H9v2[PD-L1] variable heavy Chain
EVQLLESGGGLVQPGGSLRLSCAASGFTFSSYAMSWVRQAPGKGLEWVSSIWRNGIVTVYADSVKGRFTISRDNSKNTLYLQMNSLRAEDTAVYYCAKWSAAFDYWGQGTLVTVSS

SEQ ID NO: 37132 - protein, 5 aa, Artificial Sequence
  Description of Artificial Sequence: Synthetic peptide
  C5H9v2[PD-L1] vhCDR1
SYAMS

SEQ ID NO: 37133 - protein, 17 aa, Artificial Sequence
  Description of Artificial Sequence: Synthetic peptide
  C5H9v2[PD-L1] vhCDR2
SIWRNGIVTVYADSVKG

SEQ ID NO: 37134 - protein, 7 aa, Artificial Sequence
  Description of Artificial Sequence: Synthetic peptide
  C5H9v2[PD-L1] vhCDR3
WSAAFDY

SEQ ID NO: 37135 - protein, 107 aa, Artificial Sequence
  Description of Artificial Sequence: Synthetic polypeptide
  C5H9v2[PD-L1] variable light Chain
DIQMTQSPSSLSASVGDRVTITCRASQSISSYLNWYQQKPGKAPKLLIYAASSLQSGVPSRFSGSGSGTDFTLTISSLQPEDFATYYCQQDNGYPSTFGGGTKVEIK

SEQ ID NO: 37136 - protein, 11 aa, Artificial Sequence
  Description of Artificial Sequence: Synthetic peptide
  C5H9v2[PD-L1] vlCDR1
RASQSISSYLN

SEQ ID NO: 37137 - protein, 7 aa, Artificial Sequence
  Description of Artificial Sequence: Synthetic peptide
  C5H9v2[PD-L1] vlCDR2
AASSLQS

SEQ ID NO: 37138 - protein, 9 aa, Artificial Sequence
  Description of Artificial Sequence: Synthetic peptide
  C5H9v2[PD-L1] vlCDR3
QQDNGYPST

SEQ ID NO: 37139 - protein, 115 aa, Artificial Sequence
  Description of Artificial Sequence: Synthetic polypeptide
  humanized 29E.2A3[PD-L1] variable heavy Chain
EVQLVQSGAEVKKPGASVKMSCKASGYTFTSYVMHWVKQAPGQRLEWIGYVNPFNDGTKYNEMFKGRATLTSDKSTSTAYMELSSLRSEDTAVYYCARQAWGYPWGQGTLVTVSS

SEQ ID NO: 37140 - protein, 5 aa, Artificial Sequence
  Description of Artificial Sequence: Synthetic peptide
  humanized 29E.2A3[PD-L1] vhCDR1
SYVMH

SEQ ID NO: 37141 - protein, 17 aa, Artificial Sequence
  Description of Artificial Sequence: Synthetic peptide
  humanized 29E.2A3[PD-L1] vhCDR2
YVNPFNDGTKYNEMFKG

SEQ ID NO: 37142 - protein, 6 aa, Artificial Sequence
  Description of Artificial Sequence: Synthetic peptide
  humanized 29E.2A3[PD-L1] vhCDR3
QAWGYP

SEQ ID NO: 37143 - protein, 111 aa, Artificial Sequence
  Description of Artificial Sequence: Synthetic polypeptide
  humanized 29E.2A3[PD-L1] variable light Chain
DIVLTQSPATLSLSPGERATLSCRATESVEYYGTSLVQWYQQKPGQPPKLLIYAASSVDSGVPSRFSGSGSGTDFTLTINSLEAEDAATYFCQQSRRVPYTFGQGTKLEIK

SEQ ID NO: 37144 - protein, 15 aa, Artificial Sequence
  Description of Artificial Sequence: Synthetic peptide
  humanized 29E.2A3[PD-L1] vlCDR1
RATESVEYYGTSLVQ

SEQ ID NO: 37145 - protein, 7 aa, Artificial Sequence
  Description of Artificial Sequence: Synthetic peptide
  humanized 29E.2A3[PD-L1] vlCDR2
AASSVDS

SEQ ID NO: 37146 - protein, 9 aa, Artificial Sequence
  Description of Artificial Sequence: Synthetic peptide
  humanized 29E.2A3[PD-L1] vlCDR3
QQSRRVPYT

SEQ ID NO: 37147 - protein, 121 aa, Artificial Sequence
  Description of Artificial Sequence: Synthetic polypeptide
  1B9[PD-L1] variable heavy Chain
DVQLQESGPGLVKPSQSLSLTCTVTGYSITSDHAWNWIRQVPGNKLEWMGYITYRGSTTYSPSLKSRISITRDTSKNQFFLQLNSVTTEDTATYYCARSMITTGYYVMDYWGQGTSVTVSS

SEQ ID NO: 37148 - protein, 6 aa, Artificial Sequence
  Description of Artificial Sequence: Synthetic peptide
  1B9[PD-L1] vhCDR1
SDHAWN

SEQ ID NO: 37149 - protein, 16 aa, Artificial Sequence
  Description of Artificial Sequence: Synthetic peptide
  1B9[PD-L1] vhCDR2
YITYRGSTTYSPSLKS

SEQ ID NO: 37150 - protein, 12 aa, Artificial Sequence
  Description of Artificial Sequence: Synthetic peptide
  1B9[PD-L1] vhCDR3
SMITTGYYVMDY

SEQ ID NO: 37151 - protein, 107 aa, Artificial Sequence
  Description of Artificial Sequence: Synthetic polypeptide
  1B9[PD-L1] variable light Chain
DIVMTQSHKFMSTSLGDRVTITCKASQDVGISVVWYQQKPGQSPKLLIYWASTRHTGVPDRFTGSGSGTDFTLTINNVQSEDLADYFCQQYSSYPLTVGAGTKLELK

SEQ ID NO: 37152 - protein, 11 aa, Artificial Sequence
  Description of Artificial Sequence: Synthetic peptide
  1B9[PD-L1] vlCDR1
KASQDVGISVV

SEQ ID NO: 37153 - protein, 7 aa, Artificial Sequence
  Description of Artificial Sequence: Synthetic peptide
  1B9[PD-L1] vlCDR2
WASTRHT

SEQ ID NO: 37154 - protein, 9 aa, Artificial Sequence
  Description of Artificial Sequence: Synthetic peptide
  1B9[PD-L1] vlCDR3
QQYSSYPLT

SEQ ID NO: 37155 - protein, 121 aa, Artificial Sequence
  Description of Artificial Sequence: Synthetic polypeptide
  4H1[PD-L1] variable heavy Chain
DVQLQESGPGLVKPSQSLSLTCTVTDYSITSDYAWTWIRQFPGNKLEWMGYITYRGTTRYNPSLTSRISFTRDTSKNQLFLQLNSVTTEDTGTYCCARSMITTGYYAMDYWGQGTSVTVSS

SEQ ID NO: 37156 - protein, 6 aa, Artificial Sequence
  Description of Artificial Sequence: Synthetic peptide
  4H1[PD-L1] vhCDR1
SDYAWT

SEQ ID NO: 37157 - protein, 16 aa, Artificial Sequence
  Description of Artificial Sequence: Synthetic peptide
  4H1[PD-L1] vhCDR2
YITYRGTTRYNPSLTS

SEQ ID NO: 37158 - protein, 12 aa, Artificial Sequence
  Description of Artificial Sequence: Synthetic peptide
  4H1[PD-L1] vhCDR3
SMITTGYYAMDY

SEQ ID NO: 37159 - protein, 107 aa, Artificial Sequence
  Description of Artificial Sequence: Synthetic polypeptide
  4H1[PD-L1] variable light Chain
DIVMTQSHKFMSTSVGDRVSISCKASQDVGISVAWYQQKPGQSPKLLIYWASTRHTGVPVRFTGSGSGTDFTLTISNVQSEDLADYFCQQYSSYPPTFGAGTKLELK

SEQ ID NO: 37160 - protein, 11 aa, Artificial Sequence
  Description of Artificial Sequence: Synthetic peptide
  4H1[PD-L1] vlCDR1
KASQDVGISVA

SEQ ID NO: 37161 - protein, 7 aa, Artificial Sequence
  Description of Artificial Sequence: Synthetic peptide
  4H1[PD-L1] vlCDR2
WASTRHT

SEQ ID NO: 37162 - protein, 9 aa, Artificial Sequence
  Description of Artificial Sequence: Synthetic peptide
  4H1[PD-L1] vlCDR3
QQYSSYPPT

SEQ ID NO: 37163 - protein, 120 aa, Artificial Sequence
  Description of Artificial Sequence: Synthetic polypeptide
  mAb-42[PD-L1] variable heavy Chain
QVQLVQSGAEVKKPGSSVKVSCKASGGTFSSYAISWVRQAPGQGLEWMGGIIPIFGTANYAQKFQGRVTITADKSTSTAYMELSSLRSEDTAVYYCARGRQMFGAGIDFWGPGTLVTVSS

SEQ ID NO: 37164 - protein, 5 aa, Artificial Sequence
  Description of Artificial Sequence: Synthetic peptide
  mAb-42[PD-L1] vhCDR1
SYAIS

SEQ ID NO: 37165 - protein, 17 aa, Artificial Sequence
  Description of Artificial Sequence: Synthetic peptide
  mAb-42[PD-L1] vhCDR2
GIIPIFGTANYAQKFQG

SEQ ID NO: 37166 - protein, 11 aa, Artificial Sequence
  Description of Artificial Sequence: Synthetic peptide
  mAb-42[PD-L1] vhCDR3
GRQMFGAGIDF

SEQ ID NO: 37167 - protein, 112 aa, Artificial Sequence
  Description of Artificial Sequence: Synthetic polypeptide
  mAb-42[PD-L1] variable light Chain
NFMLTQPHSVSESPGKTVTISCTRSSGSIDSNYVQWYQQRPGSAPTTVIYEDNQRPSGVPDRFSGSIDSSSNSASLTISGLKTEDEADYYCQSYDSNNRHVIFGGGTKLTVL

SEQ ID NO: 37168 - protein, 13 aa, Artificial Sequence
  Description of Artificial Sequence: Synthetic peptide
  mAb-42[PD-L1] vlCDR1
TRSSGSIDSNYVQ

SEQ ID NO: 37169 - protein, 7 aa, Artificial Sequence
  Description of Artificial Sequence: Synthetic peptide
  mAb-42[PD-L1] vlCDR2
EDNQRPS

SEQ ID NO: 37170 - protein, 11 aa, Artificial Sequence
  Description of Artificial Sequence: Synthetic peptide
  mAb-42[PD-L1] vlCDR3
QSYDSNNRHVI

SEQ ID NO: 37171 - protein, 120 aa, Artificial Sequence
  Description of Artificial Sequence: Synthetic polypeptide
  BAP058-03[PD-L1] variable heavy Chain
EVQLVQSGAEVKKPGATVKISCKVSGYTFTSYWMYWVRQATGQGLEWMGRIDPNSGSTKYNEKFKNRVTITADKSTSTAYMELSSLRSEDTAVYYCARDYRKGLYAMDYWGQGTTVTVSS

SEQ ID NO: 37172 - protein, 5 aa, Artificial Sequence
  Description of Artificial Sequence: Synthetic peptide
  BAP058-03[PD-L1] vhCDR1
SYWMY

SEQ ID NO: 37173 - protein, 17 aa, Artificial Sequence
  Description of Artificial Sequence: Synthetic peptide
  BAP058-03[PD-L1] vhCDR2
RIDPNSGSTKYNEKFKN

SEQ ID NO: 37174 - protein, 11 aa, Artificial Sequence
  Description of Artificial Sequence: Synthetic peptide
  BAP058-03[PD-L1] vhCDR3
DYRKGLYAMDY

SEQ ID NO: 37175 - protein, 107 aa, Artificial Sequence
  Description of Artificial Sequence: Synthetic polypeptide
  BAP058-03[PD-L1] variable light Chain
EIVLTQSPDFQSVTPKEKVTITCKASQDVGTAVAWYLQKPGQSPQLLIYWASTRHTGVPDRFSGSGSGTDFTLKISRVEAEDVGVYYCQQYNSYPLTFGQGTKVEIK

SEQ ID NO: 37176 - protein, 11 aa, Artificial Sequence
  Description of Artificial Sequence: Synthetic peptide
  BAP058-03[PD-L1] vlCDR1
KASQDVGTAVA

SEQ ID NO: 37177 - protein, 7 aa, Artificial Sequence
  Description of Artificial Sequence: Synthetic peptide
  BAP058-03[PD-L1] vlCDR2
WASTRHT

SEQ ID NO: 37178 - protein, 9 aa, Artificial Sequence
  Description of Artificial Sequence: Synthetic peptide
  BAP058-03[PD-L1] vlCDR3
QQYNSYPLT

SEQ ID NO: 37179 - protein, 120 aa, Artificial Sequence
  Description of Artificial Sequence: Synthetic polypeptide
  BAP058-04[PD-L1] variable heavy Chain
EVQLVQSGAEVKKPGESLRISCKGSGYTFTSYWMYWVRQAPGQGLEWMGRIDPNSGSTKYNEKFKNRVTISVDTSKNQFSLKLSSVTAADTAVYYCARDYRKGLYAMDYWGQGTTVTVSS

SEQ ID NO: 37180 - protein, 5 aa, Artificial Sequence
  Description of Artificial Sequence: Synthetic peptide
  BAP058-04[PD-L1] vhCDR1
SYWMY

SEQ ID NO: 37181 - protein, 17 aa, Artificial Sequence
  Description of Artificial Sequence: Synthetic peptide
  BAP058-04[PD-L1] vhCDR2
RIDPNSGSTKYNEKFKN

SEQ ID NO: 37182 - protein, 11 aa, Artificial Sequence
  Description of Artificial Sequence: Synthetic peptide
  BAP058-04[PD-L1] vhCDR3
DYRKGLYAMDY

SEQ ID NO: 37183 - protein, 107 aa, Artificial Sequence
  Description of Artificial Sequence: Synthetic polypeptide
  BAP058-04[PD-L1] variable light Chain
EIVLTQSPDFQSVTPKEKVTITCKASQDVGTAVAWYLQKPGQSPQLLIYWASTRHTGVPSRFSGSGSGTDFTFTISSLQPEDIATYYCQQYNSYPLTFGQGTKVEIK

SEQ ID NO: 37184 - protein, 11 aa, Artificial Sequence
  Description of Artificial Sequence: Synthetic peptide
  BAP058-04[PD-L1] vlCDR1
KASQDVGTAVA

SEQ ID NO: 37185 - protein, 7 aa, Artificial Sequence
  Description of Artificial Sequence: Synthetic peptide
  BAP058-04[PD-L1] vlCDR2
WASTRHT

SEQ ID NO: 37186 - protein, 9 aa, Artificial Sequence
  Description of Artificial Sequence: Synthetic peptide
  BAP058-04[PD-L1] vlCDR3
QQYNSYPLT

SEQ ID NO: 37187 - protein, 120 aa, Artificial Sequence
  Description of Artificial Sequence: Synthetic polypeptide
  BAP058-06[PD-L1] variable heavy Chain
EVQLVQSGAEVKKPGESLRISCKGSGYTFTSYWMYWIRQPPGKGLEWIGRIDPNSGSTKYNEKFKNRVTITADKSTSTAYMELSSLRSEDTAVYYCARDYRKGLYAMDYWGQGTTVTVSS

SEQ ID NO: 37188 - protein, 5 aa, Artificial Sequence
  Description of Artificial Sequence: Synthetic peptide
  BAP058-06[PD-L1] vhCDR1
SYWMY

SEQ ID NO: 37189 - protein, 17 aa, Artificial Sequence
  Description of Artificial Sequence: Synthetic peptide
  BAP058-06[PD-L1] vhCDR2
RIDPNSGSTKYNEKFKN

SEQ ID NO: 37190 - protein, 11 aa, Artificial Sequence
  Description of Artificial Sequence: Synthetic peptide
  BAP058-06[PD-L1] vhCDR3
DYRKGLYAMDY

SEQ ID NO: 37191 - protein, 107 aa, Artificial Sequence; identical to SEQ ID NO: 37183
  Description of Artificial Sequence: Synthetic polypeptide
  BAP058-06[PD-L1] variable light Chain

SEQ ID NO: 37192 - protein, 11 aa, Artificial Sequence
  Description of Artificial Sequence: Synthetic peptide
  BAP058-06[PD-L1] vlCDR1
KASQDVGTAVA

SEQ ID NO: 37193 - protein, 7 aa, Artificial Sequence
  Description of Artificial Sequence: Synthetic peptide
  BAP058-06[PD-L1] vlCDR2
WASTRHT

SEQ ID NO: 37194 - protein, 9 aa, Artificial Sequence
  Description of Artificial Sequence: Synthetic peptide
  BAP058-06[PD-L1] vlCDR3
QQYNSYPLT

SEQ ID NO: 37195 - protein, 120 aa, Artificial Sequence
  Description of Artificial Sequence: Synthetic polypeptide
  BAP058-07[PD-L1] variable heavy Chain
QVQLVQSGAEVKKPGASVKVSCKASGYTFTSYWMYWIRQSPSRGLEWLGRIDPNSGSTKYNEKFKNRFTISRDDSKNTAYLQMNSLKTEDTAVYYCARDYRKGLYAMDYWGQGTTVTVSS

SEQ ID NO: 37196 - protein, 5 aa, Artificial Sequence
  Description of Artificial Sequence: Synthetic peptide
  BAP058-07[PD-L1] vhCDR1
SYWMY

SEQ ID NO: 37197 - protein, 17 aa, Artificial Sequence
  Description of Artificial Sequence: Synthetic peptide
  BAP058-07[PD-L1] vhCDR2
RIDPNSGSTKYNEKFKN

SEQ ID NO: 37198 - protein, 11 aa, Artificial Sequence
  Description of Artificial Sequence: Synthetic peptide
  BAP058-07[PD-L1] vhCDR3
DYRKGLYAMDY

SEQ ID NO: 37199 - protein, 107 aa, Artificial Sequence
  Description of Artificial Sequence: Synthetic polypeptide
  BAP058-07[PD-L1] variable light Chain
EIVLTQSPATLSLSPGERATLSCKASQDVGTAVAWYLQKPGQSPQLLIYWASTRHTGIPPRFSGSGYGTDFTLTINNIESEDAAYYFCQQYNSYPLTFGQGTKVEIK

SEQ ID NO: 37200 - protein, 11 aa, Artificial Sequence
  Description of Artificial Sequence: Synthetic peptide
  BAP058-07[PD-L1] vlCDR1
KASQDVGTAVA

SEQ ID NO: 37201 - protein, 7 aa, Artificial Sequence
  Description of Artificial Sequence: Synthetic peptide
  BAP058-07[PD-L1] vlCDR2
WASTRHT

SEQ ID NO: 37202 - protein, 9 aa, Artificial Sequence
  Description of Artificial Sequence: Synthetic peptide
  BAP058-07[PD-L1] vlCDR3
QQYNSYPLT

SEQ ID NO: 37203 - protein, 120 aa, Artificial Sequence; identical to SEQ ID NO: 37171
  Description of Artificial Sequence: Synthetic polypeptide
  BAP058-11[PD-L1] variable heavy Chain

SEQ ID NO: 37204 - protein, 5 aa, Artificial Sequence
  Description of Artificial Sequence: Synthetic peptide
  BAP058-11[PD-L1] vhCDR1
SYWMY

SEQ ID NO: 37205 - protein, 17 aa, Artificial Sequence
  Description of Artificial Sequence: Synthetic peptide
  BAP058-11[PD-L1] vhCDR2
RIDPNSGSTKYNEKFKN

SEQ ID NO: 37206 - protein, 11 aa, Artificial Sequence
  Description of Artificial Sequence: Synthetic peptide
  BAP058-11[PD-L1] vhCDR3
DYRKGLYAMDY

SEQ ID NO: 37207 - protein, 107 aa, Artificial Sequence
  Description of Artificial Sequence: Synthetic polypeptide
  BAP058-11[PD-L1] variable light Chain
DVVMTQSPLSLPVTLGQPASISCKASQDVGTAVAWYQQKPGQAPRLLIYWASTRHTGVPSRFSGSGSGTEFTLTISSLQPDDFATYYCQQYNSYPLTFGQGTKVEIK

SEQ ID NO: 37208 - protein, 11 aa, Artificial Sequence
  Description of Artificial Sequence: Synthetic peptide
  BAP058-11[PD-L1] vlCDR1
KASQDVGTAVA

SEQ ID NO: 37209 - protein, 7 aa, Artificial Sequence
  Description of Artificial Sequence: Synthetic peptide
  BAP058-11[PD-L1] vlCDR2
WASTRHT

SEQ ID NO: 37210 - protein, 9 aa, Artificial Sequence
  Description of Artificial Sequence: Synthetic peptide
  BAP058-11[PD-L1] vlCDR3
QQYNSYPLT

SEQ ID NO: 37211 - protein, 120 aa, Artificial Sequence
  Description of Artificial Sequence: Synthetic polypeptide
  BAP058-13[PD-L1] variable heavy Chain
EVQLVQSGAEVKKPGATVKISCKVSGYTFTSYWMYWVRQARGQRLEWIGRIDPNSGSTKYNEKFKNRFTISRDNSKNTLYLQMNSLRAEDTAVYYCARDYRKGLYAMDYWGQGTTVTVSS

SEQ ID NO: 37212 - protein, 5 aa, Artificial Sequence
  Description of Artificial Sequence: Synthetic peptide
  BAP058-13[PD-L1] vhCDR1
SYWMY

SEQ ID NO: 37213 - protein, 17 aa, Artificial Sequence
  Description of Artificial Sequence: Synthetic peptide
  BAP058-13[PD-L1] vhCDR2
RIDPNSGSTKYNEKFKN

SEQ ID NO: 37214 - protein, 11 aa, Artificial Sequence
  Description of Artificial Sequence: Synthetic peptide
  BAP058-13[PD-L1] vhCDR3
DYRKGLYAMDY

SEQ ID NO: 37215 - protein, 107 aa, Artificial Sequence
  Description of Artificial Sequence: Synthetic polypeptide
  BAP058-13[PD-L1] variable light Chain
AIQLTQSPSSLSASVGDRVTITCKASQDVGTAVAWYLQKPGQSPQLLIYWASTRHTGVPSRFSGSGSGTDFTFTISSLEAEDAATYYCQQYNSYPLTFGQGTKVEIK

SEQ ID NO: 37216 - protein, 11 aa, Artificial Sequence
  Description of Artificial Sequence: Synthetic peptide
  BAP058-13[PD-L1] vlCDR1
KASQDVGTAVA

SEQ ID NO: 37217 - protein, 7 aa, Artificial Sequence
  Description of Artificial Sequence: Synthetic peptide
  BAP058-13[PD-L1] vlCDR2
WASTRHT

SEQ ID NO: 37218 - protein, 9 aa, Artificial Sequence
  Description of Artificial Sequence: Synthetic peptide
  BAP058-13[PD-L1] vlCDR3
QQYNSYPLT

SEQ ID NO: 37219 - protein, 121 aa, Artificial Sequence
  Description of Artificial Sequence: Synthetic polypeptide
  H6[PD-L1] variable heavy Chain
QMQLVQSGAEVKKPGSSVKVSCKASGGTFSSYAISWVRQAPGQGLEWMGGIIPIFGTANYAQKFQGRVTITADESTSTAYMELSSLRSEDTAVYYCARGNIVATITPLDYWGQGTLVTVSS

SEQ ID NO: 37220 - protein, 5 aa, Artificial Sequence
  Description of Artificial Sequence: Synthetic peptide
  H6[PD-L1] vhCDR1
SYAIS

SEQ ID NO: 37221 - protein, 17 aa, Artificial Sequence
  Description of Artificial Sequence: Synthetic peptide
  H6[PD-L1] vhCDR2
GIIPIFGTANYAQKFQG

SEQ ID NO: 37222 - protein, 12 aa, Artificial Sequence
  Description of Artificial Sequence: Synthetic peptide
  H6[PD-L1] vhCDR3
GNIVATITPLDY

SEQ ID NO: 37223 - protein, 108 aa, Artificial Sequence
  Description of Artificial Sequence: Synthetic polypeptide
  H6[PD-L1] variable light Chain
SYELMQPPSVSVAPGKTATIACGGENIGRKTVHWYQQKPGQAPVLVIYYDSDRPSGIPERFSGSNSGNTATLTISRVEAGDEADYYCQVWDSSSDHRIFGGGTKLTVL

SEQ ID NO: 37224 - protein, 11 aa, Artificial Sequence
  Description of Artificial Sequence: Synthetic peptide
  H6[PD-L1] vlCDR1
GGENIGRKTVH

SEQ ID NO: 37225 - protein, 7 aa, Artificial Sequence
  Description of Artificial Sequence: Synthetic peptide
  H6[PD-L1] vlCDR2
YDSDRPS

SEQ ID NO: 37226 - protein, 11 aa, Artificial Sequence
  Description of Artificial Sequence: Synthetic peptide
  H6[PD-L1] vlCDR3
QVWDSSSDHRI

SEQ ID NO: 37227 - protein, 121 aa, Artificial Sequence
  Description of Artificial Sequence: Synthetic polypeptide
  RC5[PD-L1] variable heavy Chain
EVQLLESGGGVVQPGGSLRLSCAASGFTFSSYWMSWVRQAPGKGLEWVANIKQDGSEKYYVDSVKGRFTISRDNSKNTVSLQMNSLRAEDTAVYYCAKDRYYNFPLGMDVWGQGTTVTVSS

SEQ ID NO: 37228 - protein, 5 aa, Artificial Sequence
  Description of Artificial Sequence: Synthetic peptide
  RC5[PD-L1] vhCDR1
SYWMS

SEQ ID NO: 37229 - protein, 17 aa, Artificial Sequence
  Description of Artificial Sequence: Synthetic peptide
  RC5[PD-L1] vhCDR2
NIKQDGSEKYYVDSVKG

SEQ ID NO: 37230 - protein, 12 aa, Artificial Sequence
  Description of Artificial Sequence: Synthetic peptide
  RC5[PD-L1] vhCDR3
DRYYNFPLGMDV

SEQ ID NO: 37231 - protein, 107 aa, Artificial Sequence
  Description of Artificial Sequence: Synthetic polypeptide
  RC5[PD-L1] variable light Chain
AIRMTQSPSSLSASVGDRVTITCRASQSISSYLNWYQQKPGKAPKLLIYTTSSLKSGVPSRFSGSGSGTDFTLTISRLQPEDFATYYCQQSYSSTWTFGRGTKVEIK

SEQ ID NO: 37232 - protein, 11 aa, Artificial Sequence
  Description of Artificial Sequence: Synthetic peptide
  RC5[PD-L1] vlCDR1
RASQSISSYLN

SEQ ID NO: 37233 - protein, 7 aa, Artificial Sequence
  Description of Artificial Sequence: Synthetic peptide
  RC5[PD-L1] vlCDR2
TTSSLKS

SEQ ID NO: 37234 - protein, 9 aa, Artificial Sequence
  Description of Artificial Sequence: Synthetic peptide
  RC5[PD-L1] vlCDR3
QQSYSSTWT

SEQ ID NO: 37235 - protein, 123 aa, Artificial Sequence
  Description of Artificial Sequence: Synthetic polypeptide
  SH1A1Q[PD-L1] variable heavy Chain
EVQLVQSGAEVKKPGSSVKVSCKASGGTFSSYAISWVRQAPGQGLEWMGGIIPIFGTANYAQKFQGRVTITADKSTSTAYMELSSLRSEDTAVYYCAREGTIYDSSGYSFDYWGQGTLVTVSS

SEQ ID NO: 37236 - protein, 5 aa, Artificial Sequence
  Description of Artificial Sequence: Synthetic peptide
  SH1A1Q[PD-L1] vhCDR1
SYAIS

SEQ ID NO: 37237 - protein, 17 aa, Artificial Sequence
  Description of Artificial Sequence: Synthetic peptide
  SH1A1Q[PD-L1] vhCDR2
GIIPIFGTANYAQKFQG

SEQ ID NO: 37238 - protein, 14 aa, Artificial Sequence
  Description of Artificial Sequence: Synthetic peptide
  SH1A1Q[PD-L1] vhCDR3
EGTIYDSSGYSFDY

SEQ ID NO: 37239 - protein, 110 aa, Artificial Sequence
  Description of Artificial Sequence: Synthetic polypeptide
  SH1A1Q[PD-L1] variable light Chain
QSVLTQPPSVSAAPGQKVTISCSGNNSNIANNYVSWYQQLPGTAPKLLIYDNNYRPSGIPDRFSGSKSGTSATLDITGLQTGDEADYYCGVWDGSLTTGVFGGGTKLTVL

SEQ ID NO: 37240 - protein, 13 aa, Artificial Sequence
  Description of Artificial Sequence: Synthetic peptide
  SH1A1Q[PD-L1] vlCDR1
SGNNSNIANNYVS

SEQ ID NO: 37241 - protein, 7 aa, Artificial Sequence
  Description of Artificial Sequence: Synthetic peptide
  SH1A1Q[PD-L1] vlCDR2
DNNYRPS

SEQ ID NO: 37242 - protein, 11 aa, Artificial Sequence
  Description of Artificial Sequence: Synthetic peptide
  SH1A1Q[PD-L1] vlCDR3
GVWDGSLTTGV

SEQ ID NO: 37243 - protein, 118 aa, Artificial Sequence
  Description of Artificial Sequence: Synthetic polypeptide
  SH1B3[PD-L1] variable heavy Chain
QVQLVESGGGVVQPGRSLRLSCAASGFTFSSYAMHWVRQAPGKGLEWVAVISFDGSNKYYADSVRGRFTISRDNSKNTLYLQMNSLRTEDTAVYYCARGWLDRDIDYWGQGTLVTVSS

SEQ ID NO: 37244 - protein, 5 aa, Artificial Sequence
  Description of Artificial Sequence: Synthetic peptide
  SH1B3[PD-L1] vhCDR1
SYAMH

SEQ ID NO: 37245 - protein, 17 aa, Artificial Sequence
  Description of Artificial Sequence: Synthetic peptide
  SH1B3[PD-L1] vhCDR2
VISFDGSNKYYADSVRG

SEQ ID NO: 37246 - protein, 9 aa, Artificial Sequence
  Description of Artificial Sequence: Synthetic peptide
  SH1B3[PD-L1] vhCDR3
GWLDRDIDY

SEQ ID NO: 37247 - protein, 110 aa, Artificial Sequence
  Description of Artificial Sequence: Synthetic polypeptide
  SH1B3[PD-L1] variable light Chain
LPVLTQPASVSGSPGQSITISCTGTTSDIGGYDYVSWYQQHPGKAPKLMIYDVSKRPSGVSNRFSGSKSGNTASLTISGLQAEDEADYYCSSYTSSSTHVFGTGTKLTVL

SEQ ID NO: 37248 - protein, 14 aa, Artificial Sequence
  Description of Artificial Sequence: Synthetic peptide
  SH1B3[PD-L1] vlCDR1
TGTTSDIGGYDYVS

SEQ ID NO: 37249 - protein, 7 aa, Artificial Sequence
  Description of Artificial Sequence: Synthetic peptide
  SH1B3[PD-L1] vlCDR2
DVSKRPS

SEQ ID NO: 37250 - protein, 10 aa, Artificial Sequence
  Description of Artificial Sequence: Synthetic peptide
  SH1B3[PD-L1] vlCDR3
SSYTSSSTHV

SEQ ID NO: 37251 - protein, 118 aa, Artificial Sequence
  Description of Artificial Sequence: Synthetic polypeptide
  SH1D1[PD-L1] variable heavy Chain
EVQLVESGGGVVQPGRSLRLSCAASGFTFSSYAMHWVRQAPGKGLEWVAVISFDGSNKYYADSVRGRFTISRDNSKNTLYLQMNSLRTEDTAVYYCARGWLDRDIDYWGQGTLVTVSS

SEQ ID NO: 37252 - protein, 5 aa, Artificial Sequence
  Description of Artificial Sequence: Synthetic peptide
  SH1D1[PD-L1] vhCDR1
SYAMH

SEQ ID NO: 37253 - protein, 17 aa, Artificial Sequence
  Description of Artificial Sequence: Synthetic peptide
  SH1D1[PD-L1] vhCDR2
VISFDGSNKYYADSVRG

SEQ ID NO: 37254 - protein, 9 aa, Artificial Sequence
  Description of Artificial Sequence: Synthetic peptide
  SH1D1[PD-L1] vhCDR3
GWLDRDIDY

SEQ ID NO: 37255 - protein, 111 aa, Artificial Sequence
  Description of Artificial Sequence: Synthetic polypeptide
  SH1D1[PD-L1] variable light Chain
QSALTQPASVSGSPGQSITISCTGTSSDVGGYNYVSWYQQHPGKAPKLMIYDVSNRPSGVSNRFSGSKSGNTASLTISGLQAEDEADYYCSSYRSSTLGPVFGGGTKLTVL

SEQ ID NO: 37256 - protein, 14 aa, Artificial Sequence
  Description of Artificial Sequence: Synthetic peptide
  SH1D1[PD-L1] vlCDR1
TGTSSDVGGYNYVS

SEQ ID NO: 37257 - protein, 7 aa, Artificial Sequence
  Description of Artificial Sequence: Synthetic peptide
  SH1D1[PD-L1] vlCDR2
DVSNRPS

SEQ ID NO: 37258 - protein, 11 aa, Artificial Sequence
  Description of Artificial Sequence: Synthetic peptide
  SH1D1[PD-L1] vlCDR3
SSYRSSTLGPV

SEQ ID NO: 37259 - protein, 118 aa, Artificial Sequence; identical to SEQ ID NO: 37243
  Description of Artificial Sequence: Synthetic polypeptide
  SH1D2[PD-L1] variable heavy Chain

SEQ ID NO: 37260 - protein, 5 aa, Artificial Sequence
  Description of Artificial Sequence: Synthetic peptide
  SH1D2[PD-L1] vhCDR1
SYAMH

SEQ ID NO: 37261 - protein, 17 aa, Artificial Sequence
  Description of Artificial Sequence: Synthetic peptide
  SH1D2[PD-L1] vhCDR2
VISFDGSNKYYADSVRG

SEQ ID NO: 37262 - protein, 9 aa, Artificial Sequence
  Description of Artificial Sequence: Synthetic peptide
  SH1D2[PD-L1] vhCDR3
GWLDRDIDY

SEQ ID NO: 37263 - protein, 110 aa, Artificial Sequence
  Description of Artificial Sequence: Synthetic polypeptide
  SH1D2[PD-L1] variable light Chain
QAGLTQPPSVSEAPRQRVTISCSGSSSNIGNNAVNWYQQLPGKAPKLLIYYDDLLPSGVSDRFSGSKSGTSASLAISGLQSEDEADYYCAAWDDSLNGYVFGTGTKLTVL

SEQ ID NO: 37264 - protein, 13 aa, Artificial Sequence
  Description of Artificial Sequence: Synthetic peptide
  SH1D2[PD-L1] vlCDR1
SGSSSNIGNNAVN

SEQ ID NO: 37265 - protein, 7 aa, Artificial Sequence
  Description of Artificial Sequence: Synthetic peptide
  SH1D2[PD-L1] vlCDR2
YDDLLPS

SEQ ID NO: 37266 - protein, 11 aa, Artificial Sequence
  Description of Artificial Sequence: Synthetic peptide
  SH1D2[PD-L1] vlCDR3
AAWDDSLNGYV

SEQ ID NO: 37267 - protein, 118 aa, Artificial Sequence; identical to SEQ ID NO: 37251
  Description of Artificial Sequence: Synthetic polypeptide
  SH1D12[PD-L1] variable heavy Chain

SEQ ID NO: 37268 - protein, 5 aa, Artificial Sequence
  Description of Artificial Sequence: Synthetic peptide
  SH1D12[PD-L1] vhCDR1
SYAMH

SEQ ID NO: 37269 - protein, 17 aa, Artificial Sequence
  Description of Artificial Sequence: Synthetic peptide
  SH1D12[PD-L1] vhCDR2
VISFDGSNKYYADSVRG

SEQ ID NO: 37270 - protein, 9 aa, Artificial Sequence
  Description of Artificial Sequence: Synthetic peptide
  SH1D12[PD-L1] vhCDR3
GWLDRDIDY

SEQ ID NO: 37271 - protein, 110 aa, Artificial Sequence
  Description of Artificial Sequence: Synthetic polypeptide
  SH1D12[PD-L1] variable light Chain
QSALTQPRSVSGSPGQSVTISCTGTSSDVGGYNYVSWYQQHPGKAPKLMIYDVSKRPSGVPDRFSGSKSGNTASLTISGLQAEDEADYYCSSYTSSTTHVFGTGTKVTVL

SEQ ID NO: 37272 - protein, 14 aa, Artificial Sequence
  Description of Artificial Sequence: Synthetic peptide
  SH1D12[PD-L1] vlCDR1
TGTSSDVGGYNYVS

SEQ ID NO: 37273 - protein, 7 aa, Artificial Sequence
  Description of Artificial Sequence: Synthetic peptide
  SH1D12[PD-L1] vlCDR2
DVSKRPS

SEQ ID NO: 37274 - protein, 10 aa, Artificial Sequence
  Description of Artificial Sequence: Synthetic peptide
  SH1D12[PD-L1] vlCDR3
SSYTSSTTHV

SEQ ID NO: 37275 - protein, 118 aa, Artificial Sequence; identical to SEQ ID NO: 37251
  Description of Artificial Sequence: Synthetic polypeptide
  SH1E1[PD-L1] variable heavy Chain

SEQ ID NO: 37276 - protein, 5 aa, Artificial Sequence
  Description of Artificial Sequence: Synthetic peptide
  SH1E1[PD-L1] vhCDR1
SYAMH

SEQ ID NO: 37277 - protein, 17 aa, Artificial Sequence
  Description of Artificial Sequence: Synthetic peptide
  SH1E1[PD-L1] vhCDR2
VISFDGSNKYYADSVRG

SEQ ID NO: 37278 - protein, 9 aa, Artificial Sequence
  Description of Artificial Sequence: Synthetic peptide
  SH1E1[PD-L1] vhCDR3
GWLDRDIDY

SEQ ID NO: 37279 - protein, 110 aa, Artificial Sequence
  Description of Artificial Sequence: Synthetic polypeptide
  SH1E1[PD-L1] variable light Chain
QSVVTQPPSVSAAPGQKVTISCSGSSSNIGNNYVSWYQQLPGTAPKLLIYDNNKRPSGIPDRFSGSKSGTSATLGITGLQTGDEADYYCGTWDSSLSVWVFGGGTQLTVL

SEQ ID NO: 37280 - protein, 13 aa, Artificial Sequence
  Description of Artificial Sequence: Synthetic peptide
  SH1E1[PD-L1] vlCDR1
SGSSSNIGNNYVS

SEQ ID NO: 37281 - protein, 7 aa, Artificial Sequence
  Description of Artificial Sequence: Synthetic peptide
  SH1E1[PD-L1] vlCDR2
DNNKRPS

SEQ ID NO: 37282 - protein, 11 aa, Artificial Sequence
  Description of Artificial Sequence: Synthetic peptide
  SH1E1[PD-L1] vlCDR3
GTWDSSLSVWV

SEQ ID NO: 37283 - protein, 118 aa, Artificial Sequence; identical to SEQ ID NO: 37243
  Description of Artificial Sequence: Synthetic polypeptide
  SH1G9[PD-L1] variable heavy Chain

SEQ ID NO: 37284 - protein, 5 aa, Artificial Sequence
  Description of Artificial Sequence: Synthetic peptide
  SH1G9[PD-L1] vhCDR1
SYAMH

SEQ ID NO: 37285 - protein, 17 aa, Artificial Sequence
  Description of Artificial Sequence: Synthetic peptide
  SH1G9[PD-L1] vhCDR2
VISFDGSNKYYADSVRG

SEQ ID NO: 37286 - protein, 9 aa, Artificial Sequence
  Description of Artificial Sequence: Synthetic peptide
  SH1G9[PD-L1] vhCDR3
GWLDRDIDY

SEQ ID NO: 37287 - protein, 112 aa, Artificial Sequence
  Description of Artificial Sequence: Synthetic polypeptide
  SH1G9[PD-L1] variable light Chain
QSVLTQPASVSGSPGQSITISCTGTSSDVGGYNYVSWYQQHPGRAPRLMIYDVSNRPSGVSNRFSGSKSGNTASLTISGLQAEDEGDYYCSSYTSGGTLGPVFGGGTKLTVL

SEQ ID NO: 37288 - protein, 14 aa, Artificial Sequence
  Description of Artificial Sequence: Synthetic peptide
  SH1G9[PD-L1] vlCDR1
TGTSSDVGGYNYVS

SEQ ID NO: 37289 - protein, 7 aa, Artificial Sequence
  Description of Artificial Sequence: Synthetic peptide
  SH1G9[PD-L1] vlCDR2
DVSNRPS

SEQ ID NO: 37290 - protein, 12 aa, Artificial Sequence
  Description of Artificial Sequence: Synthetic peptide
  SH1G9[PD-L1] vlCDR3
SSYTSGGTLGPV

SEQ ID NO: 37291 - protein, 120 aa, Artificial Sequence
  Description of Artificial Sequence: Synthetic polypeptide
  SH1E6[PD-L1] variable heavy Chain
QVQLVQSGAEVKKPGSSVKVSCKASGGTFSRYGVHWVRQAPGQGLEWMGRLIPIVSMTNYAQKFQDRVSITTDKSTGTAYMELRSLTSEDTALYYCASVGQQLPWVFFAWGQGTLVTVSS

SEQ ID NO: 37292 - protein, 5 aa, Artificial Sequence
  Description of Artificial Sequence: Synthetic peptide
  SH1E6[PD-L1] vhCDR1
RYGVH

SEQ ID NO: 37293 - protein, 17 aa, Artificial Sequence
  Description of Artificial Sequence: Synthetic peptide
  SH1E6[PD-L1] vhCDR2
RLIPIVSMTNYAQKFQD

SEQ ID NO: 37294 - protein, 11 aa, Artificial Sequence
  Description of Artificial Sequence: Synthetic peptide
  SH1E6[PD-L1] vhCDR3
VGQQLPWVFFA

SEQ ID NO: 37295 - protein, 110 aa, Artificial Sequence
  Description of Artificial Sequence: Synthetic polypeptide
  SH1E6[PD-L1] variable light Chain
QSVVTQPPSVSAAPGQKVTISCSGSSSNIGNNYVSWYQQLPGTAPKLLIYDNNKRPSGIPDRFSGSKSGTSATLGITGLQTGDEADYYCGTWDSSLSAVVFGGGTKLTVL

SEQ ID NO: 37296 - protein, 13 aa, Artificial Sequence
  Description of Artificial Sequence: Synthetic peptide
  SH1E6[PD-L1] vlCDR1
SGSSSNIGNNYVS

SEQ ID NO: 37297 - protein, 7 aa, Artificial Sequence
  Description of Artificial Sequence: Synthetic peptide
  SH1E6[PD-L1] vlCDR2
DNNKRPS

SEQ ID NO: 37298 - protein, 11 aa, Artificial Sequence
  Description of Artificial Sequence: Synthetic peptide
  SH1E6[PD-L1] vlCDR3
GTWDSSLSAVV

SEQ ID NO: 37299 - protein, 118 aa, Artificial Sequence
  Description of Artificial Sequence: Synthetic polypeptide
  SH1A2[PD-L1] variable heavy Chain
QMQLVQSGGGVVQPGRSLRLSCAASGFTFSSYAMHWVRQAPGKGLEWVAVISFDGSNKYYADSVRGRFTISRDNSKNTLYLQMNSLRTEDTAVYYCARGWLDRDIDYWGQGTLVTVSS

SEQ ID NO: 37300 - protein, 5 aa, Artificial Sequence
  Description of Artificial Sequence: Synthetic peptide
  SH1A2[PD-L1] vhCDR1
SYAMH

SEQ ID NO: 37301 - protein, 17 aa, Artificial Sequence
  Description of Artificial Sequence: Synthetic peptide
  SH1A2[PD-L1] vhCDR2
VISFDGSNKYYADSVRG

SEQ ID NO: 37302 - protein, 9 aa, Artificial Sequence
  Description of Artificial Sequence: Synthetic peptide
  SH1A2[PD-L1] vhCDR3
GWLDRDIDY

SEQ ID NO: 37303 - protein, 110 aa, Artificial Sequence
  Description of Artificial Sequence: Synthetic polypeptide
  SH1A2[PD-L1] variable light Chain
QSVVTQPPSVSAAPGQKVTISCSGSSSNIGNNYVSWYQQVPGTAPKLLIYDNNKRPSGIPDRFSGSNSDTSATLGITGLQTGDEADYYCGTWDSSLSAWVFGGGTKLTVL

SEQ ID NO: 37304 - protein, 13 aa, Artificial Sequence
  Description of Artificial Sequence: Synthetic peptide
  SH1A2[PD-L1] vlCDR1
SGSSSNIGNNYVS

SEQ ID NO: 37305 - protein, 7 aa, Artificial Sequence
  Description of Artificial Sequence: Synthetic peptide
  SH1A2[PD-L1] vlCDR2
DNNKRPS

SEQ ID NO: 37306 - protein, 11 aa, Artificial Sequence
  Description of Artificial Sequence: Synthetic peptide
  SH1A2[PD-L1] vlCDR3
GTWDSSLSAWV

SEQ ID NO: 37307 - protein, 118 aa, Artificial Sequence
  Description of Artificial Sequence: Synthetic polypeptide
  SH1B1[PD-L1] variable heavy Chain
QVQLVQSGGGVVQPGRSLRLSCAASGFTFSSYAMHWVRQAPGKGLEWVAVISFDGSNKYYADSVRGRFTISRDNSKNTLYLQMNSLRTEDTAVYYCARGWLDRDIDYWGQGTLVTVSS

SEQ ID NO: 37308 - protein, 5 aa, Artificial Sequence
  Description of Artificial Sequence: Synthetic peptide
  SH1B1[PD-L1] vhCDR1
SYAMH

SEQ ID NO: 37309 - protein, 17 aa, Artificial Sequence
  Description of Artificial Sequence: Synthetic peptide
  SH1B1[PD-L1] vhCDR2
VISFDGSNKYYADSVRG

SEQ ID NO: 37310 - protein, 9 aa, Artificial Sequence
  Description of Artificial Sequence: Synthetic peptide
  SH1B1[PD-L1] vhCDR3
GWLDRDIDY

SEQ ID NO: 37311 - protein, 112 aa, Artificial Sequence
  Description of Artificial Sequence: Synthetic polypeptide
  SH1B1[PD-L1] variable light Chain
QSVVTQPPSVSAAPGQKVTISCSGSSSNIGNNYVSWYQQLPGTAPKLLIYDNNKRPSGIPDRFSGSKSGTSATLGITGLQTGDEADYYCGTWDSSLSAGSVVFGGGTKLTVL

SEQ ID NO: 37312 - protein, 13 aa, Artificial Sequence
  Description of Artificial Sequence: Synthetic peptide
  SH1B1[PD-L1] vlCDR1
SGSSSNIGNNYVS

SEQ ID NO: 37313 - protein, 7 aa, Artificial Sequence
  Description of Artificial Sequence: Synthetic peptide
  SH1B1[PD-L1] vlCDR2
DNNKRPS

SEQ ID NO: 37314 - protein, 13 aa, Artificial Sequence
  Description of Artificial Sequence: Synthetic peptide
  SH1B1[PD-L1] vlCDR3
GTWDSSLSAGSVV

SEQ ID NO: 37315 - protein, 121 aa, Artificial Sequence
  Description of Artificial Sequence: Synthetic polypeptide
  H6B1L[PD-L1] variable heavy Chain
QMQLVQSGAEVKKPGSSVKVSCKASGGTFSSYAYSWVRQAPGQGLEWMGGIIPSFGTANYAQKFQGRVTITADESTSTAYMELSSLRSEDTAVYYCARGPIVATITPLDYWGQGTLVTVSS

SEQ ID NO: 37316 - protein, 5 aa, Artificial Sequence
  Description of Artificial Sequence: Synthetic peptide
  H6B1L[PD-L1] vhCDR1
SYAYS

SEQ ID NO: 37317 - protein, 17 aa, Artificial Sequence
  Description of Artificial Sequence: Synthetic peptide
  H6B1L[PD-L1] vhCDR2
GIIPSFGTANYAQKFQG

SEQ ID NO: 37318 - protein, 12 aa, Artificial Sequence
  Description of Artificial Sequence: Synthetic peptide
  H6B1L[PD-L1] vhCDR3
GPIVATITPLDY

SEQ ID NO: 37319 - protein, 108 aa, Artificial Sequence
  Description of Artificial Sequence: Synthetic polypeptide
  H6B1L[PD-L1] variable light Chain
SYELMQPPSVSVAPGKTATIACGGENIGRKTVHWYQQKPGQAPVLVIYYDSDRPSGIPERFSGSNSGNTATLTISRVEAGDEADYYCLVWDSSSDHRIFGGGTKLTVL

SEQ ID NO: 37320 - protein, 11 aa, Artificial Sequence
  Description of Artificial Sequence: Synthetic peptide
  H6B1L[PD-L1] vlCDR1
GGENIGRKTVH

SEQ ID NO: 37321 - protein, 7 aa, Artificial Sequence
  Description of Artificial Sequence: Synthetic peptide
  H6B1L[PD-L1] vlCDR2
YDSDRPS

SEQ ID NO: 37322 - protein, 11 aa, Artificial Sequence
  Description of Artificial Sequence: Synthetic peptide
  H6B1L[PD-L1] vlCDR3
LVWDSSSDHRI

SEQ ID NO: 37323 - protein, 121 aa, Artificial Sequence
  Description of Artificial Sequence: Synthetic polypeptide
  H6A1[PD-L1] variable heavy Chain
QMQLVQSGAEVKKPGSSVKVSCKASGGTFSSYAYSWVRQAPGQGLEWMGGIIPIFGTANYAQKFQGRVTITADESTSTAYMELSSLRSEDTAVYYCARGPIVATITPLDYWGQGTLVTVSS

SEQ ID NO: 37324 - protein, 5 aa, Artificial Sequence
  Description of Artificial Sequence: Synthetic peptide
  H6A1[PD-L1] vhCDR1
SYAYS

SEQ ID NO: 37325 - protein, 17 aa, Artificial Sequence
  Description of Artificial Sequence: Synthetic peptide
  H6A1[PD-L1] vhCDR2
GIIPIFGTANYAQKFQG

SEQ ID NO: 37326 - protein, 12 aa, Artificial Sequence
  Description of Artificial Sequence: Synthetic peptide
  H6A1[PD-L1] vhCDR3
GPIVATITPLDY

SEQ ID NO: 37327 - protein, 108 aa, Artificial Sequence; identical to SEQ ID NO: 37223
  Description of Artificial Sequence: Synthetic polypeptide
  H6A1[PD-L1] variable light Chain

SEQ ID NO: 37328 - protein, 11 aa, Artificial Sequence
  Description of Artificial Sequence: Synthetic peptide
  H6A1[PD-L1] vlCDR1
GGENIGRKTVH

SEQ ID NO: 37329 - protein, 7 aa, Artificial Sequence
  Description of Artificial Sequence: Synthetic peptide
  H6A1[PD-L1] vlCDR2
YDSDRPS

SEQ ID NO: 37330 - protein, 11 aa, Artificial Sequence
  Description of Artificial Sequence: Synthetic peptide
  H6A1[PD-L1] vlCDR3
QVWDSSSDHRI

SEQ ID NO: 37331 - protein, 121 aa, Artificial Sequence; identical to SEQ ID NO: 37315
  Description of Artificial Sequence: Synthetic polypeptide
  H6B1[PD-L1] variable heavy Chain

SEQ ID NO: 37332 - protein, 5 aa, Artificial Sequence
  Description of Artificial Sequence: Synthetic peptide
  H6B1[PD-L1] vhCDR1
SYAYS

SEQ ID NO: 37333 - protein, 17 aa, Artificial Sequence
  Description of Artificial Sequence: Synthetic peptide
  H6B1[PD-L1] vhCDR2
GIIPSFGTANYAQKFQG

SEQ ID NO: 37334 - protein, 12 aa, Artificial Sequence
  Description of Artificial Sequence: Synthetic peptide
  H6B1[PD-L1] vhCDR3
GPIVATITPLDY

SEQ ID NO: 37335 - protein, 108 aa, Artificial Sequence; identical to SEQ ID NO: 37223
  Description of Artificial Sequence: Synthetic polypeptide
  H6B1[PD-L1] variable light Chain

SEQ ID NO: 37336 - protein, 11 aa, Artificial Sequence
  Description of Artificial Sequence: Synthetic peptide
  H6B1[PD-L1] vlCDR1
GGENIGRKTVH

SEQ ID NO: 37337 - protein, 7 aa, Artificial Sequence
  Description of Artificial Sequence: Synthetic peptide
  H6B1[PD-L1] vlCDR2
YDSDRPS

SEQ ID NO: 37338 - protein, 11 aa, Artificial Sequence
  Description of Artificial Sequence: Synthetic peptide
  H6B1[PD-L1] vlCDR3
QVWDSSSDHRI

SEQ ID NO: 37339 - protein, 121 aa, Artificial Sequence
  Description of Artificial Sequence: Synthetic polypeptide
  H6B2[PD-L1] variable heavy Chain
QMQLVQSGAEVKKPGSSVKVSCKASGGTFSSYAISWVRQAPGQGLEWMGGIIPAFGTANYAQKFQGRVTITADESTSTAYMELSSLRSEDTAVYYCARGPIVATITPLDYWGQGTLVTVSS

SEQ ID NO: 37340 - protein, 5 aa, Artificial Sequence
  Description of Artificial Sequence: Synthetic peptide
  H6B2[PD-L1] vhCDR1
SYAIS

SEQ ID NO: 37341 - protein, 17 aa, Artificial Sequence
  Description of Artificial Sequence: Synthetic peptide
  H6B2[PD-L1] vhCDR2
GIIPAFGTANYAQKFQG

SEQ ID NO: 37342 - protein, 12 aa, Artificial Sequence
  Description of Artificial Sequence: Synthetic peptide
  H6B2[PD-L1] vhCDR3
GPIVATITPLDY

SEQ ID NO: 37343 - protein, 108 aa, Artificial Sequence; identical to SEQ ID NO: 37223
  Description of Artificial Sequence: Synthetic polypeptide
  H6B2[PD-L1] variable light Chain

SEQ ID NO: 37344 - protein, 11 aa, Artificial Sequence
  Description of Artificial Sequence: Synthetic peptide
  H6B2[PD-L1] vlCDR1
GGENIGRKTVH

SEQ ID NO: 37345 - protein, 7 aa, Artificial Sequence
  Description of Artificial Sequence: Synthetic peptide
  H6B2[PD-L1] vlCDR2
YDSDRPS

SEQ ID NO: 37346 - protein, 11 aa, Artificial Sequence
  Description of Artificial Sequence: Synthetic peptide
  H6B2[PD-L1] vlCDR3
QVWDSSSDHRI

SEQ ID NO: 37347 - protein, 118 aa, Artificial Sequence
  Description of Artificial Sequence: Synthetic polypeptide
  G12[PD-L1] variable heavy Chain
EVQLVQSGAEVKKPGASVKVSCKASGYTFTGYYMHWVRQAPGQGLEWMGWINPNSDNTGSAQKFQGRVFMTKTTSLNTAYMELSGLRSEDTAIYYCARERSSGYFDFWGQGTLVTVSS

SEQ ID NO: 37348 - protein, 5 aa, Artificial Sequence
  Description of Artificial Sequence: Synthetic peptide
  G12[PD-L1] vhCDR1
GYYMH

SEQ ID NO: 37349 - protein, 17 aa, Artificial Sequence
  Description of Artificial Sequence: Synthetic peptide
  G12[PD-L1] vhCDR2
WINPNSDNTGSAQKFQG

SEQ ID NO: 37350 - protein, 9 aa, Artificial Sequence
  Description of Artificial Sequence: Synthetic peptide
  G12[PD-L1] vhCDR3
ERSSGYFDF

SEQ ID NO: 37351 - protein, 107 aa, Artificial Sequence
  Description of Artificial Sequence: Synthetic polypeptide
  G12[PD-L1] variable light Chain
DIVMTQSPSSLSASVGDRVTITCRASQSISSYLNWYQQKPGKAPKLLIYAASSLQSGVPSRFSGSGSGTDFTLTISSLQPEDFATYYCQQSYSTPITFGQGTRLEIK

SEQ ID NO: 37352 - protein, 11 aa, Artificial Sequence
  Description of Artificial Sequence: Synthetic peptide
  G12[PD-L1] vlCDR1
RASQSISSYLN

SEQ ID NO: 37353 - protein, 7 aa, Artificial Sequence
  Description of Artificial Sequence: Synthetic peptide
  G12[PD-L1] vlCDR2
AASSLQS

SEQ ID NO: 37354 - protein, 9 aa, Artificial Sequence
  Description of Artificial Sequence: Synthetic peptide
  G12[PD-L1] vlCDR3
QQSYSTPIT

SEQ ID NO: 37355 - protein, 118 aa, Artificial Sequence
  Description of Artificial Sequence: Synthetic polypeptide
  RSA1[PD-L1] variable heavy Chain
EVQLVQSGGGLVQPGGSLRLSCAASGFTFSSYSMNWVRQAPGKGLEWVSYISSSSSTIYYADSVKGRFTISRDNAKNSLYLQMNSLRDEDTAVYYCARGDYYYGMDVWGQGTTVTVSS

SEQ ID NO: 37356 - protein, 5 aa, Artificial Sequence
  Description of Artificial Sequence: Synthetic peptide
  RSA1[PD-L1] vhCDR1
SYSMN

SEQ ID NO: 37357 - protein, 17 aa, Artificial Sequence
  Description of Artificial Sequence: Synthetic peptide
  RSA1[PD-L1] vhCDR2
YISSSSSTIYYADSVKG

SEQ ID NO: 37358 - protein, 9 aa, Artificial Sequence
  Description of Artificial Sequence: Synthetic peptide
  RSA1[PD-L1] vhCDR3
GDYYYGMDV

SEQ ID NO: 37359 - protein, 108 aa, Artificial Sequence
  Description of Artificial Sequence: Synthetic polypeptide
  RSA1[PD-L1] variable light Chain
NIQMTQSPSSVSASVGDRVTITCRASQDISRWLAWYQQKPGKAPKLLIYAASSLQSGVPSRFSGSGSGTDFALTISSLQPEDFATYYCQQADSFFSITFGQGTRLEIK

SEQ ID NO: 37360 - protein, 11 aa, Artificial Sequence
  Description of Artificial Sequence: Synthetic peptide
  RSA1[PD-L1] vlCDR1
RASQDISRWLA

SEQ ID NO: 37361 - protein, 7 aa, Artificial Sequence
  Description of Artificial Sequence: Synthetic peptide
  RSA1[PD-L1] vlCDR2
AASSLQS

SEQ ID NO: 37362 - protein, 10 aa, Artificial Sequence
  Description of Artificial Sequence: Synthetic peptide
  RSA1[PD-L1] vlCDR3
QQADSFFSIT

SEQ ID NO: 37363 - protein, 120 aa, Artificial Sequence
  Description of Artificial Sequence: Synthetic polypeptide
  RA3[PD-L1] variable heavy Chain
QMQLVQSGAEVKKPGSSVKVSCKASGGTFSRYGVHWVRQAPGQGLEWMGRLIPIVSMTNYAQKFQDRVSITTDKSTGTAYMELRSLTSEDTALYYCASVGQQLPWVFFAWGQGTLVTVSS

SEQ ID NO: 37364 - protein, 5 aa, Artificial Sequence
  Description of Artificial Sequence: Synthetic peptide
  RA3[PD-L1] vhCDR1
RYGVH

SEQ ID NO: 37365 - protein, 17 aa, Artificial Sequence
  Description of Artificial Sequence: Synthetic peptide
  RA3[PD-L1] vhCDR2
RLIPIVSMTNYAQKFQD

SEQ ID NO: 37366 - protein, 11 aa, Artificial Sequence
  Description of Artificial Sequence: Synthetic peptide
  RA3[PD-L1] vhCDR3
VGQQLPWVFFA

SEQ ID NO: 37367 - protein, 107 aa, Artificial Sequence
  Description of Artificial Sequence: Synthetic polypeptide
  RA3[PD-L1] variable light Chain
DIQMTQSPSSLSASVGDRVTITCQASQDISNYLNWYQQKPGKAPKLLIYDASTLQSGVPSRFSGSGSGTDFTLTISSLQPEDFATYYCQQSYSSHWTFGQGTKVEIK

SEQ ID NO: 37368 - protein, 11 aa, Artificial Sequence
  Description of Artificial Sequence: Synthetic peptide
  RA3[PD-L1] vlCDR1
QASQDISNYLN

SEQ ID NO: 37369 - protein, 7 aa, Artificial Sequence
  Description of Artificial Sequence: Synthetic peptide
  RA3[PD-L1] vlCDR2
DASTLQS

SEQ ID NO: 37370 - protein, 9 aa, Artificial Sequence
  Description of Artificial Sequence: Synthetic peptide
  RA3[PD-L1] vlCDR3
QQSYSSHWT

SEQ ID NO: 37371 - protein, 119 aa, Artificial Sequence
  Description of Artificial Sequence: Synthetic polypeptide
  SH1E2[PD-L1] variable heavy Chain
EVQLVESGAEVKKPGSSVKVSCKASGGTFSSYAISWVRQAPGQGLEWMGGIIPIFGTANYAQKFQGRVTITADESTSTAYMELSSLRSEDTAVYYCARAPYYYYYMDVWGQGTTVTVSS

SEQ ID NO: 37372 - protein, 5 aa, Artificial Sequence
  Description of Artificial Sequence: Synthetic peptide
  SH1E2[PD-L1] vhCDR1
SYAIS

SEQ ID NO: 37373 - protein, 17 aa, Artificial Sequence
  Description of Artificial Sequence: Synthetic peptide
  SH1E2[PD-L1] vhCDR2
GIIPIFGTANYAQKFQG

SEQ ID NO: 37374 - protein, 10 aa, Artificial Sequence
  Description of Artificial Sequence: Synthetic peptide
  SH1E2[PD-L1] vhCDR3
APYYYYYMDV

SEQ ID NO: 37375 - protein, 109 aa, Artificial Sequence
  Description of Artificial Sequence: Synthetic polypeptide
  SH1E2[PD-L1] variable light Chain
QSALTQPASVSGSLGQSVTISCTGSSSDVGSYNLVSWYQQHPGKAPNLMIYDVSKRSGVSNRFSGSKSGNTASLTISGLQAEDEADYYCSSYTGISTVVFGGGTKLTVL

SEQ ID NO: 37376 - protein, 14 aa, Artificial Sequence
  Description of Artificial Sequence: Synthetic peptide
  SH1E2[PD-L1] vlCDR1
TGSSSDVGSYNLVS

SEQ ID NO: 37377 - protein, 6 aa, Artificial Sequence
  Description of Artificial Sequence: Synthetic peptide
  SH1E2[PD-L1] vlCDR2
DVSKRS

SEQ ID NO: 37378 - protein, 10 aa, Artificial Sequence
  Description of Artificial Sequence: Synthetic peptide
  SH1E2[PD-L1] vlCDR3
SSYTGISTVV

SEQ ID NO: 37379 - protein, 120 aa, Artificial Sequence; identical to SEQ ID NO: 37291
  Description of Artificial Sequence: Synthetic polypeptide
  SH1E4[PD-L1] variable heavy Chain

SEQ ID NO: 37380 - protein, 5 aa, Artificial Sequence
  Description of Artificial Sequence: Synthetic peptide
  SH1E4[PD-L1] vhCDR1
RYGVH

SEQ ID NO: 37381 - protein, 17 aa, Artificial Sequence
  Description of Artificial Sequence: Synthetic peptide
  SH1E4[PD-L1] vhCDR2
RLIPIVSMTNYAQKFQD

SEQ ID NO: 37382 - protein, 11 aa, Artificial Sequence
  Description of Artificial Sequence: Synthetic peptide
  SH1E4[PD-L1] vhCDR3
VGQQLPWVFFA

SEQ ID NO: 37383 - protein, 112 aa, Artificial Sequence
  Description of Artificial Sequence: Synthetic polypeptide
  SH1E4[PD-L1] variable light Chain
QSVLTQPPSASGSPGQSVTISCTGTSSDIGGYDSVSWYQQHPGKAPKLMIYDVSKRPSGVSNRFSGSKSGNTASLTISGLQAEDEADYYCSSYTSSSIFFYVFGTGTKVTVL

SEQ ID NO: 37384 - protein, 14 aa, Artificial Sequence
  Description of Artificial Sequence: Synthetic peptide
  SH1E4[PD-L1] vlCDR1
TGTSSDIGGYDSVS

SEQ ID NO: 37385 - protein, 7 aa, Artificial Sequence
  Description of Artificial Sequence: Synthetic peptide
  SH1E4[PD-L1] vlCDR2
DVSKRPS

SEQ ID NO: 37386 - protein, 12 aa, Artificial Sequence
  Description of Artificial Sequence: Synthetic peptide
  SH1E4[PD-L1] vlCDR3
SSYTSSSIFFYV

SEQ ID NO: 37387 - protein, 121 aa, Artificial Sequence
  Description of Artificial Sequence: Synthetic polypeptide
  SH1B11[PD-L1] variable heavy Chain
QVQLVQSGSELKKPGSSVKVSCKASGYSFSGYYIHWVRQAPGQGLEWMGWIDPNSGVTNYVRRFQGRVTMTRDTSLSTAYMELSGLTADDTAVYYCARDENLWQFGYLDYWGQGTLVTVSS

SEQ ID NO: 37388 - protein, 5 aa, Artificial Sequence
  Description of Artificial Sequence: Synthetic peptide
  SH1B11[PD-L1] vhCDR1
GYYIH

SEQ ID NO: 37389 - protein, 17 aa, Artificial Sequence
  Description of Artificial Sequence: Synthetic peptide
  SH1B11[PD-L1] vhCDR2
WIDPNSGVTNYVRRFQG

SEQ ID NO: 37390 - protein, 12 aa, Artificial Sequence
  Description of Artificial Sequence: Synthetic peptide
  SH1B11[PD-L1] vhCDR3
DENLWQFGYLDY

SEQ ID NO: 37391 - protein, 107 aa, Artificial Sequence
  Description of Artificial Sequence: Synthetic polypeptide
  SH1B11[PD-L1] variable light Chain
DIVMTQSPSSLSASIGDRVTITCRASQRISAYVNWYQQKPGKAPKVLIYAASSLRSGVPSRFSGSGSGTDFTLTISSLQPEDFATYYCQQTYSSPWTFGQGTKVEIK

SEQ ID NO: 37392 - protein, 11 aa, Artificial Sequence
  Description of Artificial Sequence: Synthetic peptide
  SH1B11[PD-L1] vlCDR1
RASQRISAYVN

SEQ ID NO: 37393 - protein, 7 aa, Artificial Sequence
  Description of Artificial Sequence: Synthetic peptide
  SH1B11[PD-L1] vlCDR2
AASSLRS

SEQ ID NO: 37394 - protein, 9 aa, Artificial Sequence
  Description of Artificial Sequence: Synthetic peptide
  SH1B11[PD-L1] vlCDR3
QQTYSSPWT

SEQ ID NO: 37395 - protein, 119 aa, Artificial Sequence
  Description of Artificial Sequence: Synthetic polypeptide
  SH1C8[PD-L1] variable heavy Chain
EVQLVESGGGVVQPGRSLRLSCAASGFTFSSYAMHWVRQAPGKGLEWVAVISYDGSNKYYADSVKGRFTISRDNSKNTLYLQMNSLRAEDTAVYYCARGQWLVTELDYWGQGTLVTVSS

SEQ ID NO: 37396 - protein, 5 aa, Artificial Sequence
  Description of Artificial Sequence: Synthetic peptide
  SH1C8[PD-L1] vhCDR1
SYAMH

SEQ ID NO: 37397 - protein, 17 aa, Artificial Sequence
  Description of Artificial Sequence: Synthetic peptide
  SH1C8[PD-L1] vhCDR2
VISYDGSNKYYADSVKG

SEQ ID NO: 37398 - protein, 10 aa, Artificial Sequence
  Description of Artificial Sequence: Synthetic peptide
  SH1C8[PD-L1] vhCDR3
GQWLVTELDY

SEQ ID NO: 37399 - protein, 111 aa, Artificial Sequence
  Description of Artificial Sequence: Synthetic polypeptide
  SH1C8[PD-L1] variable light Chain
QSVVTQPPSVSAAPGQKVTISCSGSSSDIGNHYVSWYQQLPGTAPKLLIYDNNQRPSGIPDRFSGSKSGTSATLAITGLQTGDEADYYCGTWDNSLSPHLLFGGGTKLTVL

SEQ ID NO: 37400 - protein, 13 aa, Artificial Sequence
  Description of Artificial Sequence: Synthetic peptide
  SH1C8[PD-L1] vlCDR1
SGSSSDIGNHYVS

SEQ ID NO: 37401 - protein, 7 aa, Artificial Sequence
  Description of Artificial Sequence: Synthetic peptide
  SH1C8[PD-L1] vlCDR2
DNNQRPS

SEQ ID NO: 37402 - protein, 12 aa, Artificial Sequence
  Description of Artificial Sequence: Synthetic peptide
  SH1C8[PD-L1] vlCDR3
GTWDNSLSPHLL

SEQ ID NO: 37403 - protein, 123 aa, Artificial Sequence
  Description of Artificial Sequence: Synthetic polypeptide
  H1H9364P2[PD-L1] variable heavy Chain
EVQLVESGGGLVQPGRSLRLSCAASGFTFDDYALHWVRQAPGKGLEWVSGISWTGGTIDYADSVKGRFTISRDNAKNSLYLQMSSLRTEDTAIYYCTRDIRGNWKYGGWFDPWGQGTLVTVSS

SEQ ID NO: 37404 - protein, 5 aa, Artificial Sequence
  Description of Artificial Sequence: Synthetic peptide
  H1H9364P2[PD-L1] vhCDR1
DYALH

SEQ ID NO: 37405 - protein, 17 aa, Artificial Sequence
  Description of Artificial Sequence: Synthetic peptide
  H1H9364P2[PD-L1] vhCDR2
GISWTGGTIDYADSVKG

SEQ ID NO: 37406 - protein, 14 aa, Artificial Sequence
  Description of Artificial Sequence: Synthetic peptide
  H1H9364P2[PD-L1] vhCDR3
DIRGNWKYGGWFDP

SEQ ID NO: 37407 - protein, 108 aa, Artificial Sequence; identical to SEQ ID NO: 11711
  Description of Artificial Sequence: Synthetic polypeptide
  H1H9364P2[PD-L1] variable light Chain

SEQ ID NO: 37408 - protein, 11 aa, Artificial Sequence
  Description of Artificial Sequence: Synthetic peptide
  H1H9364P2[PD-L1] vlCDR1
RASQSISSYLN

SEQ ID NO: 37409 - protein, 7 aa, Artificial Sequence
  Description of Artificial Sequence: Synthetic peptide
  H1H9364P2[PD-L1] vlCDR2
AASSLQS

SEQ ID NO: 37410 - protein, 10 aa, Artificial Sequence
  Description of Artificial Sequence: Synthetic peptide
  H1H9364P2[PD-L1] vlCDR3
QQSYSTPPIT

SEQ ID NO: 37411 - protein, 120 aa, Artificial Sequence
  Description of Artificial Sequence: Synthetic polypeptide
  H1H9373P2[PD-L1] variable heavy Chain
QVQLVQSGTEVKKPGASVKVSCKASGYTFTAYYMHWVRQAPGQGLDWMGWISPNSGFTNYAQKFQGRVTMTRDTSINTFYMELSGLRSDDTAVYYCAREGSTHHNSFDPWGQGTLVTVSS

SEQ ID NO: 37412 - protein, 5 aa, Artificial Sequence
  Description of Artificial Sequence: Synthetic peptide
  H1H9373P2[PD-L1] vhCDR1
AYYMH

SEQ ID NO: 37413 - protein, 17 aa, Artificial Sequence
  Description of Artificial Sequence: Synthetic peptide
  H1H9373P2[PD-L1] vhCDR2
WISPNSGFTNYAQKFQG

SEQ ID NO: 37414 - protein, 11 aa, Artificial Sequence
  Description of Artificial Sequence: Synthetic peptide
  H1H9373P2[PD-L1] vhCDR3
EGSTHHNSFDP

SEQ ID NO: 37415 - protein, 108 aa, Artificial Sequence; identical to SEQ ID NO: 11711
  Description of Artificial Sequence: Synthetic polypeptide
  H1H9373P2[PD-L1] variable light Chain

SEQ ID NO: 37416 - protein, 11 aa, Artificial Sequence
  Description of Artificial Sequence: Synthetic peptide
  H1H9373P2[PD-L1] vlCDR1
RASQSISSYLN

SEQ ID NO: 37417 - protein, 7 aa, Artificial Sequence
  Description of Artificial Sequence: Synthetic peptide
  H1H9373P2[PD-L1] vlCDR2
AASSLQS

SEQ ID NO: 37418 - protein, 10 aa, Artificial Sequence
  Description of Artificial Sequence: Synthetic peptide
  H1H9373P2[PD-L1] vlCDR3
QQSYSTPPIT

SEQ ID NO: 37419 - protein, 120 aa, Artificial Sequence
  Description of Artificial Sequence: Synthetic polypeptide
  H1H8314N[PD-L1] variable heavy Chain
EVQLVESGGGVVRPGGSLRLSCAASGFTFDDYGMTWVRQAPGRGLEWVSGIHWHGKRTGYADSVKGRFTISRDNAKKSLYLQMNSLKGEDTALYHCVRGGMSTGDWFDPWGQGTLVIVSS

SEQ ID NO: 37420 - protein, 5 aa, Artificial Sequence
  Description of Artificial Sequence: Synthetic peptide
  H1H8314N[PD-L1] vhCDR1
DYGMT

SEQ ID NO: 37421 - protein, 17 aa, Artificial Sequence
  Description of Artificial Sequence: Synthetic peptide
  H1H8314N[PD-L1] vhCDR2
GIHWHGKRTGYADSVKG

SEQ ID NO: 37422 - protein, 11 aa, Artificial Sequence
  Description of Artificial Sequence: Synthetic peptide
  H1H8314N[PD-L1] vhCDR3
GGMSTGDWFDP

SEQ ID NO: 37423 - protein, 108 aa, Artificial Sequence
  Description of Artificial Sequence: Synthetic polypeptide
  H1H8314N[PD-L1] variable light Chain
DIQMTQSPSSLSASLGDRVTITCRASQSINSYLNWYQQKPGKAPKLLIYVASSLQSGVPSRFSGSGSGTEFTLTISNLQPEDFATYYCQQSYSTPPITFGQGTRLEIK

SEQ ID NO: 37424 - protein, 11 aa, Artificial Sequence
  Description of Artificial Sequence: Synthetic peptide
  H1H8314N[PD-L1] vlCDR1
RASQSINSYLN

SEQ ID NO: 37425 - protein, 7 aa, Artificial Sequence
  Description of Artificial Sequence: Synthetic peptide
  H1H8314N[PD-L1] vlCDR2
VASSLQS

SEQ ID NO: 37426 - protein, 10 aa, Artificial Sequence
  Description of Artificial Sequence: Synthetic peptide
  H1H8314N[PD-L1] vlCDR3
QQSYSTPPIT

SEQ ID NO: 37427 - protein, 119 aa, Artificial Sequence
  Description of Artificial Sequence: Synthetic polypeptide
  PDL1.3.1[PD-L1] variable heavy Chain
EVQLQQSGTELVKPGASVKLSCTTSGFNIQDTYMHWVKQRPEQGLEWIGWIDPANGNTKYDPKFQGKATIIADTSSNTAYLQLRGLTSEDTAVYYCARSGVSTAHFDYWGQGTTLTVSS

SEQ ID NO: 37428 - protein, 5 aa, Artificial Sequence
  Description of Artificial Sequence: Synthetic peptide
  PDL1.3.1[PD-L1] vhCDR1
DTYMH

SEQ ID NO: 37429 - protein, 17 aa, Artificial Sequence
  Description of Artificial Sequence: Synthetic peptide
  PDL1.3.1[PD-L1] vhCDR2
WIDPANGNTKYDPKFQG

SEQ ID NO: 37430 - protein, 10 aa, Artificial Sequence
  Description of Artificial Sequence: Synthetic peptide
  PDL1.3.1[PD-L1] vhCDR3
SGVSTAHFDY

SEQ ID NO: 37431 - protein, 106 aa, Artificial Sequence
  Description of Artificial Sequence: Synthetic polypeptide
  PDL1.3.1[PD-L1] variable light Chain
QIVLSQSPAILSASPGEKVTMTCRASSSVSFMHWYQQKPGSSPKPWIYATSNLASGVPTRFSGSGSGTSYSLTLSRVEAEDAATYYCQQWSSYPRTFGGGTKLEIK

SEQ ID NO: 37432 - protein, 10 aa, Artificial Sequence
  Description of Artificial Sequence: Synthetic peptide
  PDL1.3.1[PD-L1] vlCDR1
RASSSVSFMH

SEQ ID NO: 37433 - protein, 7 aa, Artificial Sequence
  Description of Artificial Sequence: Synthetic peptide
  PDL1.3.1[PD-L1] vlCDR2
ATSNLAS

SEQ ID NO: 37434 - protein, 9 aa, Artificial Sequence
  Description of Artificial Sequence: Synthetic peptide
  PDL1.3.1[PD-L1] vlCDR3
QQWSSYPRT

SEQ ID NO: 37435 - protein, 119 aa, Artificial Sequence; identical to SEQ ID NO: 21505
  Description of Artificial Sequence: Synthetic polypeptide
  10A7[TIGIT] variable heavy Chain

SEQ ID NO: 37436 - protein, 5 aa, Artificial Sequence
  Description of Artificial Sequence: Synthetic peptide
  10A7[TIGIT] vhCDR1
SFTMH

SEQ ID NO: 37437 - protein, 17 aa, Artificial Sequence
  Description of Artificial Sequence: Synthetic peptide
  10A7[TIGIT] vhCDR2
FIRSGSGIVFYADAVRG

SEQ ID NO: 37438 - protein, 10 aa, Artificial Sequence
  Description of Artificial Sequence: Synthetic peptide
  10A7[TIGIT] vhCDR3
RPLGHNTFDS

SEQ ID NO: 37439 - protein, 113 aa, Artificial Sequence; identical to SEQ ID NO: 21510
  Description of Artificial Sequence: Synthetic polypeptide
  10A7[TIGIT] variable light Chain

SEQ ID NO: 37440 - protein, 17 aa, Artificial Sequence
  Description of Artificial Sequence: Synthetic peptide
  10A7[TIGIT] vlCDR1
KSSQSLYYSGVKENLLA

SEQ ID NO: 37441 - protein, 7 aa, Artificial Sequence
  Description of Artificial Sequence: Synthetic peptide
  10A7[TIGIT] vlCDR2
YASIRFT

SEQ ID NO: 37442 - protein, 9 aa, Artificial Sequence
  Description of Artificial Sequence: Synthetic peptide
  10A7[TIGIT] vlCDR3
QQGINNPLT

SEQ ID NO: 37443 - protein, 119 aa, Artificial Sequence; identical to SEQ ID NO: 21515
  Description of Artificial Sequence: Synthetic polypeptide
  1F4[TIGIT] variable heavy Chain

SEQ ID NO: 37444 - protein, 5 aa, Artificial Sequence
  Description of Artificial Sequence: Synthetic peptide
  1F4[TIGIT] vhCDR1
GHLMN

SEQ ID NO: 37445 - protein, 17 aa, Artificial Sequence
  Description of Artificial Sequence: Synthetic peptide
  1F4[TIGIT] vhCDR2
LIIPYNGGTSYNQKFKG

SEQ ID NO: 37446 - protein, 10 aa, Artificial Sequence
  Description of Artificial Sequence: Synthetic peptide
  1F4[TIGIT] vhCDR3
GLRGFYAMDY

SEQ ID NO: 37447 - protein, 112 aa, Artificial Sequence; identical to SEQ ID NO: 21520
  Description of Artificial Sequence: Synthetic polypeptide
  1F4[TIGIT] variable light Chain

SEQ ID NO: 37448 - protein, 16 aa, Artificial Sequence
  Description of Artificial Sequence: Synthetic peptide
  1F4[TIGIT] vlCDR1
RSSQSLVNSYGNTFLS

SEQ ID NO: 37449 - protein, 7 aa, Artificial Sequence
  Description of Artificial Sequence: Synthetic peptide
  1F4[TIGIT] vlCDR2
GISNRFS

SEQ ID NO: 37450 - protein, 9 aa, Artificial Sequence
  Description of Artificial Sequence: Synthetic peptide
  1F4[TIGIT] vlCDR3
LQGTHQPPT

SEQ ID NO: 37451 - protein, 126 aa, Artificial Sequence
  Description of Artificial Sequence: Synthetic polypeptide
  4.1D3[TIGIT] variable heavy Chain
QVQLQQSGPGLVKPSQTLSLTCAISGDSVSSNSAAWNWIRQSPSRGLEWLGKTYYRFKWYSDYAVSVKGRITINPDTSKNQFSLQLNSVTPEDTAVFYCTRESTTYDLLAGPFDYWGQGTLVTVSS

SEQ ID NO: 37452 - protein, 7 aa, Artificial Sequence
  Description of Artificial Sequence: Synthetic peptide
  4.1D3[TIGIT] vhCDR1
SNSAAWN

SEQ ID NO: 37453 - protein, 18 aa, Artificial Sequence
  Description of Artificial Sequence: Synthetic peptide
  4.1D3[TIGIT] vhCDR2
KTYYRFKWYSDYAVSVKG

SEQ ID NO: 37454 - protein, 14 aa, Artificial Sequence
  Description of Artificial Sequence: Synthetic peptide
  4.1D3[TIGIT] vhCDR3
ESTTYDLLAGPFDY

SEQ ID NO: 37455 - protein, 113 aa, Artificial Sequence
  Description of Artificial Sequence: Synthetic polypeptide
  4.1D3[TIGIT] variable light Chain
DIVMTQSPDSLAVSLGERATINCKSSQTVLYSSNNKKYLAWYQQKPGQPPNLLIYWASTRESGVPDRFSGSGSGTDFTLTISSLQAEDVAVYYCQQYYSTPFTFGPGTKVEIK

SEQ ID NO: 37456 - protein, 17 aa, Artificial Sequence
  Description of Artificial Sequence: Synthetic peptide
  4.1D3[TIGIT] vlCDR1
KSSQTVLYSSNNKKYLA

SEQ ID NO: 37457 - protein, 7 aa, Artificial Sequence
  Description of Artificial Sequence: Synthetic peptide
  4.1D3[TIGIT] vlCDR2
WASTRES

SEQ ID NO: 37458 - protein, 9 aa, Artificial Sequence
  Description of Artificial Sequence: Synthetic peptide
  4.1D3[TIGIT] vlCDR3
QQYYSTPFT

SEQ ID NO: 37459 - protein, 126 aa, Artificial Sequence
  Description of Artificial Sequence: Synthetic polypeptide
  4.1D3.Q1E[TIGIT] variable heavy Chain
EVQLQQSGPGLVKPSQTLSLTCAISGDSVSSNSAAWNWIRQSPSRGLEWLGKTYYRFKWYSDYAVSVKGRITINPDTSKNQFSLQLNSVTPEDTAVFYCTRESTTYDLLAGPFDYWGQGTLVTVSS

SEQ ID NO: 37460 - protein, 7 aa, Artificial Sequence
  Description of Artificial Sequence: Synthetic peptide
  4.1D3.Q1E[TIGIT] vhCDR1
SNSAAWN

SEQ ID NO: 37461 - protein, 18 aa, Artificial Sequence
  Description of Artificial Sequence: Synthetic peptide
  4.1D3.Q1E[TIGIT] vhCDR2
KTYYRFKWYSDYAVSVKG

SEQ ID NO: 37462 - protein, 14 aa, Artificial Sequence
  Description of Artificial Sequence: Synthetic peptide
  4.1D3.Q1E[TIGIT] vhCDR3
ESTTYDLLAGPFDY

SEQ ID NO: 37463 - protein, 113 aa, Artificial Sequence; identical to SEQ ID NO: 37455
  Description of Artificial Sequence: Synthetic polypeptide
  4.1D3.Q1E[TIGIT] variable light Chain

SEQ ID NO: 37464 - protein, 17 aa, Artificial Sequence
  Description of Artificial Sequence: Synthetic peptide
  4.1D3.Q1E[TIGIT] vlCDR1
KSSQTVLYSSNNKKYLA

SEQ ID NO: 37465 - protein, 7 aa, Artificial Sequence
  Description of Artificial Sequence: Synthetic peptide
  4.1D3.Q1E[TIGIT] vlCDR2
WASTRES

SEQ ID NO: 37466 - protein, 9 aa, Artificial Sequence
  Description of Artificial Sequence: Synthetic peptide
  4.1D3.Q1E[TIGIT] vlCDR3
QQYYSTPFT

SEQ ID NO: 37467 - protein, 121 aa, Artificial Sequence
  Description of Artificial Sequence: Synthetic polypeptide
  Hu14D7 VH1[TIGIT] variable heavy Chain
EVQLVESGGGLVQPGGSLKLSCAASGFTFSGAWMDWVRQAPGKGLEWVAEIRTKVNNHATNYGESVKGRFTISRDDSKSTVYLQMNSLRAEDTAVYYCRGALYDGFYFDYWGQGTLVTVSS

SEQ ID NO: 37468 - protein, 5 aa, Artificial Sequence
  Description of Artificial Sequence: Synthetic peptide
  Hu14D7 VH1[TIGIT] vhCDR1
GAWMD

SEQ ID NO: 37469 - protein, 19 aa, Artificial Sequence
  Description of Artificial Sequence: Synthetic peptide
  Hu14D7 VH1[TIGIT] vhCDR2
EIRTKVNNHATNYGESVKG

SEQ ID NO: 37470 - protein, 10 aa, Artificial Sequence
  Description of Artificial Sequence: Synthetic peptide
  Hu14D7 VH1[TIGIT] vhCDR3
ALYDGFYFDY

SEQ ID NO: 37471 - protein, 121 aa, Artificial Sequence
  Description of Artificial Sequence: Synthetic polypeptide
  Hu14D7 VH2[TIGIT] variable heavy Chain
EVQLVESGGGLVQPGGSLKLSCAASGFTFSGAWMDWVRQAPGKGLEWVAEIRTKVNNHATNYGESVKGRFTISRDDSKSSVYLQMNSLRAEDTAVYYCRGALYDGFYFDYWGQGTLVTVSS

SEQ ID NO: 37472 - protein, 5 aa, Artificial Sequence
  Description of Artificial Sequence: Synthetic peptide
  Hu14D7 VH2[TIGIT] vhCDR1
GAWMD

SEQ ID NO: 37473 - protein, 19 aa, Artificial Sequence
  Description of Artificial Sequence: Synthetic peptide
  Hu14D7 VH2[TIGIT] vhCDR2
EIRTKVNNHATNYGESVKG

SEQ ID NO: 37474 - protein, 10 aa, Artificial Sequence
  Description of Artificial Sequence: Synthetic peptide
  Hu14D7 VH2[TIGIT] vhCDR3
ALYDGFYFDY

SEQ ID NO: 37475 - protein, 121 aa, Artificial Sequence
  Description of Artificial Sequence: Synthetic polypeptide
  Hu14D7 VH3[TIGIT] variable heavy Chain
EVQLVESGGGLVQPGGSLKLSCAASGFTFSGAWMDWVRQAPGKGLEWVAEIRTKVNNHATNYGESVKGRFTISRDDSKNTVYLQMNSLRAEDTAVYYCRGALYDGFYFDYWGQGTLVTVSS

SEQ ID NO: 37476 - protein, 5 aa, Artificial Sequence
  Description of Artificial Sequence: Synthetic peptide
  Hu14D7 VH3[TIGIT] vhCDR1
GAWMD

SEQ ID NO: 37477 - protein, 19 aa, Artificial Sequence
  Description of Artificial Sequence: Synthetic peptide
  Hu14D7 VH3[TIGIT] vhCDR2
EIRTKVNNHATNYGESVKG

SEQ ID NO: 37478 - protein, 10 aa, Artificial Sequence
  Description of Artificial Sequence: Synthetic peptide
  Hu14D7 VH3[TIGIT] vhCDR3
ALYDGFYFDY

SEQ ID NO: 37479 - protein, 108 aa, Artificial Sequence
  Description of Artificial Sequence: Synthetic polypeptide
  Hu14D7 VL1[TIGIT] variable light Chain
EIVLTQSPATLSLSPGERATLSCSASSSVSSGYLYWYQQKPGQAPKLWIYGTSTLASGVPARFSGSGSGTDYTLTISSLEPEDFAVYYCHQWSSFPYTFGQGTKLEIK

SEQ ID NO: 37480 - protein, 12 aa, Artificial Sequence
  Description of Artificial Sequence: Synthetic peptide
  Hu14D7 VL1[TIGIT] vlCDR1
SASSSVSSGYLY

SEQ ID NO: 37481 - protein, 7 aa, Artificial Sequence
  Description of Artificial Sequence: Synthetic peptide
  Hu14D7 VL1[TIGIT] vlCDR2
GTSTLAS

SEQ ID NO: 37482 - protein, 9 aa, Artificial Sequence
  Description of Artificial Sequence: Synthetic peptide
  Hu14D7 VL1[TIGIT] vlCDR3
HQWSSFPYT

SEQ ID NO: 37483 - protein, 108 aa, Artificial Sequence
  Description of Artificial Sequence: Synthetic polypeptide
  Hu14D7 VL2[TIGIT] variable light Chain
EIVLTQSPATLSLSPGERATLSCSASSSVSSGYLYWYQQKPGQAPRLWIYGTSTLASGVPARFSGSGSGTDYTLTISSLEPEDFAVYYCHQWSSFPYTFGQGTKLEIK

SEQ ID NO: 37484 - protein, 12 aa, Artificial Sequence
  Description of Artificial Sequence: Synthetic peptide
  Hu14D7 VL2[TIGIT] vlCDR1
SASSSVSSGYLY

SEQ ID NO: 37485 - protein, 7 aa, Artificial Sequence
  Description of Artificial Sequence: Synthetic peptide
  Hu14D7 VL2[TIGIT] vlCDR2
GTSTLAS

SEQ ID NO: 37486 - protein, 9 aa, Artificial Sequence
  Description of Artificial Sequence: Synthetic peptide
  Hu14D7 VL2[TIGIT] vlCDR3
HQWSSFPYT

SEQ ID NO: 37487 - protein, 108 aa, Artificial Sequence
  Description of Artificial Sequence: Synthetic polypeptide
  Hu14D7 VL3[TIGIT] variable light Chain
EIVLTQSPATLSLSPGERATLSCSASSSVSSGYLYWYQQKPGQAPRLWIYGTSTLASGIPARFSGSGSGTDYTLTISSLEPEDFAVYYCHQWSSFPYTFGQGTKLEIK

SEQ ID NO: 37488 - protein, 12 aa, Artificial Sequence
  Description of Artificial Sequence: Synthetic peptide
  Hu14D7 VL3[TIGIT] vlCDR1
SASSSVSSGYLY

SEQ ID NO: 37489 - protein, 7 aa, Artificial Sequence
  Description of Artificial Sequence: Synthetic peptide
  Hu14D7 VL3[TIGIT] vlCDR2
GTSTLAS

SEQ ID NO: 37490 - protein, 9 aa, Artificial Sequence
  Description of Artificial Sequence: Synthetic peptide
  Hu14D7 VL3[TIGIT] vlCDR3
HQWSSFPYT

SEQ ID NO: 37491 - protein, 119 aa, Artificial Sequence
  Description of Artificial Sequence: Synthetic polypeptide
  Hu26B10 VH1[TIGIT] variable heavy Chain
EVQLVQSGAEVKKPGASVKISCKTSGYTFTEFTMHWVKQAPGKGLEWIGGLKPDNGGISYNQKFKGRATLTVDKSTNTAYMELSSLRSEDTAVYYCARGAYYRYDADYWGQGTLVTVSS

SEQ ID NO: 37492 - protein, 5 aa, Artificial Sequence
  Description of Artificial Sequence: Synthetic peptide
  Hu26B10 VH1[TIGIT] vhCDR1
EFTMH

SEQ ID NO: 37493 - protein, 17 aa, Artificial Sequence
  Description of Artificial Sequence: Synthetic peptide
  Hu26B10 VH1[TIGIT] vhCDR2
GLKPDNGGISYNQKFKG

SEQ ID NO: 37494 - protein, 10 aa, Artificial Sequence
  Description of Artificial Sequence: Synthetic peptide
  Hu26B10 VH1[TIGIT] vhCDR3
GAYYRYDADY

SEQ ID NO: 37495 - protein, 119 aa, Artificial Sequence
  Description of Artificial Sequence: Synthetic polypeptide
  Hu26B10 VH2[TIGIT] variable heavy Chain
EVQLVQSGAEVKKPGASVKISCKTSGYTFTEFTMHWVRQAPGKGLEWIGGLKPDNGGISYNQKFKGRATLTVDKSTSTAYMELSSLRSEDTAVYYCARGAYYRYDADYWGQGTLVTVSS

SEQ ID NO: 37496 - protein, 5 aa, Artificial Sequence
  Description of Artificial Sequence: Synthetic peptide
  Hu26B10 VH2[TIGIT] vhCDR1
EFTMH

SEQ ID NO: 37497 - protein, 17 aa, Artificial Sequence
  Description of Artificial Sequence: Synthetic peptide
  Hu26B10 VH2[TIGIT] vhCDR2
GLKPDNGGISYNQKFKG

SEQ ID NO: 37498 - protein, 10 aa, Artificial Sequence
  Description of Artificial Sequence: Synthetic peptide
  Hu26B10 VH2[TIGIT] vhCDR3
GAYYRYDADY

SEQ ID NO: 37499 - protein, 119 aa, Artificial Sequence
  Description of Artificial Sequence: Synthetic polypeptide
  Hu26B10 VH3[TIGIT] variable heavy Chain
EVQLVQSGAEVKKPGASVKISCKVSGYTFTEFTMHWVRQAPGKGLEWIGGLKPDNGGISYNQKFKGRATLTVDTSTSTAYMELSSLRSEDTAVYYCARGAYYRYDADYWGQGTLVTVSS

SEQ ID NO: 37500 - protein, 5 aa, Artificial Sequence
  Description of Artificial Sequence: Synthetic peptide
  Hu26B10 VH3[TIGIT] vhCDR1
EFTMH

SEQ ID NO: 37501 - protein, 17 aa, Artificial Sequence
  Description of Artificial Sequence: Synthetic peptide
  Hu26B10 VH3[TIGIT] vhCDR2
GLKPDNGGISYNQKFKG

SEQ ID NO: 37502 - protein, 10 aa, Artificial Sequence
  Description of Artificial Sequence: Synthetic peptide
  Hu26B10 VH3[TIGIT] vhCDR3
GAYYRYDADY

SEQ ID NO: 37503 - protein, 107 aa, Artificial Sequence
  Description of Artificial Sequence: Synthetic polypeptide
  Hu26B10 VL1[TIGIT] variable light Chain
DIQLTQSPSSLSASVGDRVTITCKASQDVKTAVAWYQQKPGKAPKLLIYSASYRNTGVPDRFSGSGSGTDFTFTISSLQPEDFATYYCQQHYSTPFTFGQGTKLEIK

SEQ ID NO: 37504 - protein, 11 aa, Artificial Sequence
  Description of Artificial Sequence: Synthetic peptide
  Hu26B10 VL1[TIGIT] vlCDR1
KASQDVKTAVA

SEQ ID NO: 37505 - protein, 7 aa, Artificial Sequence
  Description of Artificial Sequence: Synthetic peptide
  Hu26B10 VL1[TIGIT] vlCDR2
SASYRNT

SEQ ID NO: 37506 - protein, 9 aa, Artificial Sequence
  Description of Artificial Sequence: Synthetic peptide
  Hu26B10 VL1[TIGIT] vlCDR3
QQHYSTPFT

SEQ ID NO: 37507 - protein, 107 aa, Artificial Sequence
  Description of Artificial Sequence: Synthetic polypeptide
  Hu26B10 VL2[TIGIT] variable light Chain
DIQLTQSPSSLSASVGDRVTITCKASQDVKTAVAWYQQKPGKAPKLLIYSASYRNTGVPSRFSGSGSGTDFTFTISSLQPEDFATYYCQQHYSTPFTFGQGTKLEIK

SEQ ID NO: 37508 - protein, 11 aa, Artificial Sequence
  Description of Artificial Sequence: Synthetic peptide
  Hu26B10 VL2[TIGIT] vlCDR1
KASQDVKTAVA

SEQ ID NO: 37509 - protein, 7 aa, Artificial Sequence
  Description of Artificial Sequence: Synthetic peptide
  Hu26B10 VL2[TIGIT] vlCDR2
SASYRNT

SEQ ID NO: 37510 - protein, 9 aa, Artificial Sequence
  Description of Artificial Sequence: Synthetic peptide
  Hu26B10 VL2[TIGIT] vlCDR3
QQHYSTPFT

SEQ ID NO: 37511 - protein, 107 aa, Artificial Sequence
  Description of Artificial Sequence: Synthetic polypeptide
  Hu26B10 VL3[TIGIT] variable light Chain
DIQLTQSPSSLSASVGDRVTITCKASQDVKTAVAWYQQKPGKAPKLLIYSASYRNTGVPSRFSGSGSGTDFTLTISSLQPEDFATYYCQQHYSTPFTFGQGTKLEIK

SEQ ID NO: 37512 - protein, 11 aa, Artificial Sequence
  Description of Artificial Sequence: Synthetic peptide
  Hu26B10 VL3[TIGIT] vlCDR1
KASQDVKTAVA

SEQ ID NO: 37513 - protein, 7 aa, Artificial Sequence
  Description of Artificial Sequence: Synthetic peptide
  Hu26B10 VL3[TIGIT] vlCDR2
SASYRNT

SEQ ID NO: 37514 - protein, 9 aa, Artificial Sequence
  Description of Artificial Sequence: Synthetic peptide
  Hu26B10 VL3[TIGIT] vlCDR3
QQHYSTPFT

SEQ ID NO: 37515 - protein, 119 aa, Artificial Sequence
  Description of Artificial Sequence: Synthetic polypeptide
  MEB125.31C6.A1.205 VH4/VL1[TIGIT] variable heavy Chain
EVQLVQSGAEVKKPGASVKVSCKASGYTFSSYVMHWVRQAPGQGLEWIGYIDPYNDGAKYAQKFQGRVTLTSDKSTSTVYMELSSLRSEDTAVYYCARGGPYGWYFDVWGQGTTVTVSS

SEQ ID NO: 37516 - protein, 5 aa, Artificial Sequence
  Description of Artificial Sequence: Synthetic peptide
  MEB125.31C6.A1.205 VH4/VL1[TIGIT] vhCDR1
SYVMH

SEQ ID NO: 37517 - protein, 17 aa, Artificial Sequence
  Description of Artificial Sequence: Synthetic peptide
  MEB125.31C6.A1.205 VH4/VL1[TIGIT] vhCDR2
YIDPYNDGAKYAQKFQG

SEQ ID NO: 37518 - protein, 10 aa, Artificial Sequence
  Description of Artificial Sequence: Synthetic peptide
  MEB125.31C6.A1.205 VH4/VL1[TIGIT] vhCDR3
GGPYGWYFDV

SEQ ID NO: 37519 - protein, 107 aa, Artificial Sequence
  Description of Artificial Sequence: Synthetic polypeptide
  MEB125.31C6.A1.205 VH4/VL1[TIGIT] variable heavy Chain
DIQMTQSPSSLSASVGDRVTITCRASEHIYSYLSWYQQKPGKAPKLLIYNAKTLAEGVPSRFSGSGSGTDFTLTISSLQPEDFATYYCQHHFGSPLTFGQGTRLEIK

SEQ ID NO: 37520 - protein, 11 aa, Artificial Sequence
  Description of Artificial Sequence: Synthetic peptide
  MEB125.31C6.A1.205 VH4/VL1[TIGIT] vhCDR1
RASEHIYSYLS

SEQ ID NO: 37521 - protein, 7 aa, Artificial Sequence
  Description of Artificial Sequence: Synthetic peptide
  MEB125.31C6.A1.205 VH4/VL1[TIGIT] vhCDR2
NAKTLAE

SEQ ID NO: 37522 - protein, 9 aa, Artificial Sequence
  Description of Artificial Sequence: Synthetic peptide
  MEB125.31C6.A1.205 VH4/VL1[TIGIT] vhCDR3
QHHFGSPLT

SEQ ID NO: 37523 - protein, 119 aa, Artificial Sequence
  Description of Artificial Sequence: Synthetic polypeptide
  MEB125.31C6.A1.205 VH5/VL4[TIGIT] variable heavy Chain
EVQLVQSGAEVKKPGSSVKVSCKASGYTFSSYVMHWVRQAPGQGLEWIGYIDPYNDGAKYAQKFQGRVTLTSDKSTSTAYMELSSLRSEDTAVYYCARGGPYGWYFDVWGQGTTVTVSS

SEQ ID NO: 37524 - protein, 5 aa, Artificial Sequence
  Description of Artificial Sequence: Synthetic peptide
  MEB125.31C6.A1.205 VH5/VL4[TIGIT] vhCDR1
SYVMH

SEQ ID NO: 37525 - protein, 17 aa, Artificial Sequence
  Description of Artificial Sequence: Synthetic peptide
  MEB125.31C6.A1.205 VH5/VL4[TIGIT] vhCDR2
YIDPYNDGAKYAQKFQG

SEQ ID NO: 37526 - protein, 10 aa, Artificial Sequence
  Description of Artificial Sequence: Synthetic peptide
  MEB125.31C6.A1.205 VH5/VL4[TIGIT] vhCDR3
GGPYGWYFDV

SEQ ID NO: 37527 - protein, 107 aa, Artificial Sequence
  Description of Artificial Sequence: Synthetic polypeptide
  MEB125.31C6.A1.205 VH5/VL4[TIGIT] variable heavy Chain
DIQMTQSPSSLSASVGDRVTITCRASEHIYSYLSWYQQKPGKVPKLLIYNAKTLAEGVPSRFSGSGSGTQFTLTISSLQPEDVATYYCQHHFGSPLTFGQGTRLEIK

SEQ ID NO: 37528 - protein, 11 aa, Artificial Sequence
  Description of Artificial Sequence: Synthetic peptide
  MEB125.31C6.A1.205 VH5/VL4[TIGIT] vhCDR1
RASEHIYSYLS

SEQ ID NO: 37529 - protein, 7 aa, Artificial Sequence
  Description of Artificial Sequence: Synthetic peptide
  MEB125.31C6.A1.205 VH5/VL4[TIGIT] vhCDR2
NAKTLAE

SEQ ID NO: 37530 - protein, 9 aa, Artificial Sequence
  Description of Artificial Sequence: Synthetic peptide
  MEB125.31C6.A1.205 VH5/VL4[TIGIT] vhCDR3
QHHFGSPLT

SEQ ID NO: 37531 - protein, 119 aa, Artificial Sequence; identical to SEQ ID NO: 37523
  Description of Artificial Sequence: Synthetic polypeptide
  MEB125.31C6.A1.205 VH5/VL3[TIGIT] variable heavy Chain

SEQ ID NO: 37532 - protein, 5 aa, Artificial Sequence
  Description of Artificial Sequence: Synthetic peptide
  MEB125.31C6.A1.205 VH5/VL3[TIGIT] vhCDR1
SYVMH

SEQ ID NO: 37533 - protein, 17 aa, Artificial Sequence
  Description of Artificial Sequence: Synthetic peptide
  MEB125.31C6.A1.205 VH5/VL3[TIGIT] vhCDR2
YIDPYNDGAKYAQKFQG

SEQ ID NO: 37534 - protein, 10 aa, Artificial Sequence
  Description of Artificial Sequence: Synthetic peptide
  MEB125.31C6.A1.205 VH5/VL3[TIGIT] vhCDR3
GGPYGWYFDV

SEQ ID NO: 37535 - protein, 107 aa, Artificial Sequence
  Description of Artificial Sequence: Synthetic polypeptide
  MEB125.31C6.A1.205 VH5/VL3[TIGIT] variable heavy Chain
DIQMTQSPSSLSASVGDRVTITCRASEHIYSYLSWYQQKPGKVPKLLIYNAKTLAEGVPSRFSGSGSGTDFTLTISSLQPEDVATYYCQHHFGSPLTFGQGTRLEIK

SEQ ID NO: 37536 - protein, 11 aa, Artificial Sequence
  Description of Artificial Sequence: Synthetic peptide
  MEB125.31C6.A1.205 VH5/VL3[TIGIT] vhCDR1
RASEHIYSYLS

SEQ ID NO: 37537 - protein, 7 aa, Artificial Sequence
  Description of Artificial Sequence: Synthetic peptide
  MEB125.31C6.A1.205 VH5/VL3[TIGIT] vhCDR2
NAKTLAE

SEQ ID NO: 37538 - protein, 9 aa, Artificial Sequence
  Description of Artificial Sequence: Synthetic peptide
  MEB125.31C6.A1.205 VH5/VL3[TIGIT] vhCDR3
QHHFGSPLT

SEQ ID NO: 37539 - protein, 118 aa, Artificial Sequence
  Description of Artificial Sequence: Synthetic polypeptide
  15A6[TIGIT] variable heavy Chain
QLQLQESGPGLVKPSETLSLTCTVSGGSISSSRYFWGWIRQPPGKGLEWIGYIYYRGSTYYNPSLKSRVTIAVDTSKNQFSLKLSSVTAADTAVYYCASSSAWYFDYWGQGNLVTVSS

SEQ ID NO: 37540 - protein, 7 aa, Artificial Sequence
  Description of Artificial Sequence: Synthetic peptide
  15A6[TIGIT] vhCDR1
SSRYFWG

SEQ ID NO: 37541 - protein, 16 aa, Artificial Sequence
  Description of Artificial Sequence: Synthetic peptide
  15A6[TIGIT] vhCDR2
YIYYRGSTYYNPSLKS

SEQ ID NO: 37542 - protein, 8 aa, Artificial Sequence
  Description of Artificial Sequence: Synthetic peptide
  15A6[TIGIT] vhCDR3
SSAWYFDY

SEQ ID NO: 37543 - protein, 107 aa, Artificial Sequence
  Description of Artificial Sequence: Synthetic polypeptide
  15A6[TIGIT] variable light Chain
EIVLTQSPGTLSLSPGERATLSCRASQSVSSSYLAWYQQKPGQAPRLLIYGASSRATGIPDRFSGSGSGTDFTLTISRLEPEDFAVYYCQQYGSLYTFGQGTKLEIK

SEQ ID NO: 37544 - protein, 12 aa, Artificial Sequence
  Description of Artificial Sequence: Synthetic peptide
  15A6[TIGIT] vlCDR1
RASQSVSSSYLA

SEQ ID NO: 37545 - protein, 7 aa, Artificial Sequence
  Description of Artificial Sequence: Synthetic peptide
  15A6[TIGIT] vlCDR2
GASSRAT

SEQ ID NO: 37546 - protein, 8 aa, Artificial Sequence
  Description of Artificial Sequence: Synthetic peptide
  15A6[TIGIT] vlCDR3
QQYGSLYT

SEQ ID NO: 37547 - protein, 130 aa, Artificial Sequence
  Description of Artificial Sequence: Synthetic polypeptide
  22G2[TIGIT] variable heavy Chain
QVHLQESGPGLVKPSETLSLTCTVSGGSVSSGIYYWSWIRQPPGKGLEWIGYIYYSGSTNYNPSLKSRVTISVDTSKNQFSLKLSSVTAADTAVYYCARDYYVSGNYYNVDYYFFGVDVWGQGTTVTVSS

SEQ ID NO: 37548 - protein, 7 aa, Artificial Sequence
  Description of Artificial Sequence: Synthetic peptide
  22G2[TIGIT] vhCDR1
SGIYYWS

SEQ ID NO: 37549 - protein, 16 aa, Artificial Sequence
  Description of Artificial Sequence: Synthetic peptide
  22G2[TIGIT] vhCDR2
YIYYSGSTNYNPSLKS

SEQ ID NO: 37550 - protein, 20 aa, Artificial Sequence
  Description of Artificial Sequence: Synthetic peptide
  22G2[TIGIT] vhCDR3
DYYVSGNYYNVDYYFFGVDV

SEQ ID NO: 37551 - protein, 109 aa, Artificial Sequence
  Description of Artificial Sequence: Synthetic polypeptide
  22G2[TIGIT] variable light Chain
EIVLTQSPATLSLSPGERATLSCRASQSVSSYLAWYQQKPGQAPRLLIYDASNRATGIPARFSGSGSGTDFTLTISSLEPEDFAVYYCQQRSNWPPLFTFGPGTKVDIK

SEQ ID NO: 37552 - protein, 11 aa, Artificial Sequence
  Description of Artificial Sequence: Synthetic peptide
  22G2[TIGIT] vlCDR1
RASQSVSSYLA

SEQ ID NO: 37553 - protein, 7 aa, Artificial Sequence
  Description of Artificial Sequence: Synthetic peptide
  22G2[TIGIT] vlCDR2
DASNRAT

SEQ ID NO: 37554 - protein, 11 aa, Artificial Sequence
  Description of Artificial Sequence: Synthetic peptide
  22G2[TIGIT] vlCDR3
QQRSNWPPLFT

SEQ ID NO: 37555 - protein, 126 aa, Artificial Sequence
  Description of Artificial Sequence: Synthetic polypeptide
  11G11[TIGIT] variable heavy Chain
QLQLQESGPGLVKPSETLSLTCTVSGGSISSSSHYWGWIRQPPGKGLEWIGNIFYSGHTYYNPSLKSRVTISVDTSKNQFSLKLSSVTAADTAVYYCARQGLLWFGGLSPYYFDYWGQGTLVTVSS

SEQ ID NO: 37556 - protein, 7 aa, Artificial Sequence
  Description of Artificial Sequence: Synthetic peptide
  11G11[TIGIT] vhCDR1
SSSHYWG

SEQ ID NO: 37557 - protein, 16 aa, Artificial Sequence
  Description of Artificial Sequence: Synthetic peptide
  11G11[TIGIT] vhCDR2
NIFYSGHTYYNPSLKS

SEQ ID NO: 37558 - protein, 16 aa, Artificial Sequence
  Description of Artificial Sequence: Synthetic peptide
  11G11[TIGIT] vhCDR3
QGLLWFGGLSPYYFDY

SEQ ID NO: 37559 - protein, 106 aa, Artificial Sequence
  Description of Artificial Sequence: Synthetic polypeptide
  11G11[TIGIT] variable light Chain
EIVLTQSPATLSLSPGERATLSCRASQSVSSYLAWYQQKPGQAPRLLIYDASNRATGIPARFSGSGSGTDFTLTISSLEPEDFAVYYCQQRSNWPTFGQGTKLEIK

SEQ ID NO: 37560 - protein, 11 aa, Artificial Sequence
  Description of Artificial Sequence: Synthetic peptide
  11G11[TIGIT] vlCDR1
RASQSVSSYLA

SEQ ID NO: 37561 - protein, 7 aa, Artificial Sequence
  Description of Artificial Sequence: Synthetic peptide
  11G11[TIGIT] vlCDR2
DASNRAT

SEQ ID NO: 37562 - protein, 8 aa, Artificial Sequence
  Description of Artificial Sequence: Synthetic peptide
  11G11[TIGIT] vlCDR3
QQRSNWPT

SEQ ID NO: 37563 - protein, 128 aa, Artificial Sequence
  Description of Artificial Sequence: Synthetic polypeptide
  10D7[TIGIT] variable heavy Chain
QGQLVQSGAEVKKPGSSVKVSCKASGGIFRNYAISWVRQAPGQGLEWMGGIIPFFGTANYAQKFQGRVTITADESTSTAYMELSSLRSEDTAVYYCARGGAAAGTTRYGYYYYGMDVWGQGTTVTVSS

SEQ ID NO: 37564 - protein, 5 aa, Artificial Sequence
  Description of Artificial Sequence: Synthetic peptide
  10D7[TIGIT] vhCDR1
NYAIS

SEQ ID NO: 37565 - protein, 17 aa, Artificial Sequence
  Description of Artificial Sequence: Synthetic peptide
  10D7[TIGIT] vhCDR2
GIIPFFGTANYAQKFQG

SEQ ID NO: 37566 - protein, 19 aa, Artificial Sequence
  Description of Artificial Sequence: Synthetic peptide
  10D7[TIGIT] vhCDR3
GGAAAGTTRYGYYYYGMDV

SEQ ID NO: 37567 - protein, 107 aa, Artificial Sequence
  Description of Artificial Sequence: Synthetic polypeptide
  10D7[TIGIT] variable light Chain
DIQMTQSPSSLSASVGDRVTITCRASQGISSWLAWYQQKPEKAPKSLIYAASSLQSGVPSRFSGSGSGTDFTLTISSLQPEDFATYYCQQYNSYPITFGQGTRLEIK

SEQ ID NO: 37568 - protein, 11 aa, Artificial Sequence
  Description of Artificial Sequence: Synthetic peptide
  10D7[TIGIT] vlCDR1
RASQGISSWLA

SEQ ID NO: 37569 - protein, 7 aa, Artificial Sequence
  Description of Artificial Sequence: Synthetic peptide
  10D7[TIGIT] vlCDR2
AASSLQS

SEQ ID NO: 37570 - protein, 9 aa, Artificial Sequence
  Description of Artificial Sequence: Synthetic peptide
  10D7[TIGIT] vlCDR3
QQYNSYPIT

SEQ ID NO: 37571 - protein, 116 aa, Artificial Sequence
  Description of Artificial Sequence: Synthetic polypeptide
  313R19[TIGIT] variable heavy Chain
QVQLQESGPGLVKPSETLSLTCTVSGFSLSSSYMSWIRQPPGKGLEWIGIIGSNGNTYYANWAKGRVTISKSSNQVSLKLSSVTAADTAVYYCARGGYRTSGMDPWGQGTLVTVSS

SEQ ID NO: 37572 - protein, 5 aa, Artificial Sequence
  Description of Artificial Sequence: Synthetic peptide
  313R19[TIGIT] vhCDR1
SSYMS

SEQ ID NO: 37573 - protein, 14 aa, Artificial Sequence
  Description of Artificial Sequence: Synthetic peptide
  313R19[TIGIT] vhCDR2
IIGSNGNTYYANWA

SEQ ID NO: 37574 - protein, 10 aa, Artificial Sequence
  Description of Artificial Sequence: Synthetic peptide
  313R19[TIGIT] vhCDR3
GGYRTSGMDP

SEQ ID NO: 37575 - protein, 110 aa, Artificial Sequence
  Description of Artificial Sequence: Synthetic polypeptide
  313R19[TIGIT] variable light Chain
DIQMTQSPSSLSASVGDRVTITCQASQNIYSDLAWYQQKPGKAPKLLIYRASTLASGVPSRFSGSGSGTDFTLTISSLQPEDFATYYCQQEHLVAWIYNVFGQGTKVEIK

SEQ ID NO: 37576 - protein, 11 aa, Artificial Sequence
  Description of Artificial Sequence: Synthetic peptide
  313R19[TIGIT] vlCDR1
QASQNIYSDLA

SEQ ID NO: 37577 - protein, 7 aa, Artificial Sequence
  Description of Artificial Sequence: Synthetic peptide
  313R19[TIGIT] vlCDR2
RASTLAS

SEQ ID NO: 37578 - protein, 12 aa, Artificial Sequence
  Description of Artificial Sequence: Synthetic peptide
  313R19[TIGIT] vlCDR3
QQEHLVAWIYNV

SEQ ID NO: 37579 - protein, 118 aa, Artificial Sequence
  Description of Artificial Sequence: Synthetic polypeptide
  313M32[TIGIT] variable heavy Chain
QVQLQESGPGLVKPSETLSLTCAVSGYSITSDYAWNWIRQPPGKGLEWIGYISYSGSTSYNPSLRSRVTISRDTSKNQFFLKLSSVTAADTAVYYCARRQVGLGFAYWGQGTLVTVSS

SEQ ID NO: 37580 - protein, 6 aa, Artificial Sequence
  Description of Artificial Sequence: Synthetic peptide
  313M32[TIGIT] vhCDR1
SDYAWN

SEQ ID NO: 37581 - protein, 16 aa, Artificial Sequence
  Description of Artificial Sequence: Synthetic peptide
  313M32[TIGIT] vhCDR2
YISYSGSTSYNPSLRS

SEQ ID NO: 37582 - protein, 9 aa, Artificial Sequence
  Description of Artificial Sequence: Synthetic peptide
  313M32[TIGIT] vhCDR3
RQVGLGFAY

SEQ ID NO: 37583 - protein, 99 aa, Artificial Sequence
  Description of Artificial Sequence: Synthetic polypeptide
  313M32[TIGIT] variable light Chain
DIQMTQSPSSLSASVGDRVTITCKASQDVSTAVAWYQQKPGKAPKLLIYSASYRYTGVPSRFSGSGSGTDFTFTISSLQPEDIATYYCQQHYSTPWTFG

SEQ ID NO: 37584 - protein, 11 aa, Artificial Sequence
  Description of Artificial Sequence: Synthetic peptide
  313M32[TIGIT] vlCDR1
KASQDVSTAVA

SEQ ID NO: 37585 - protein, 7 aa, Artificial Sequence
  Description of Artificial Sequence: Synthetic peptide
  313M32[TIGIT] vlCDR2
SASYRYT

SEQ ID NO: 37586 - protein, 9 aa, Artificial Sequence
  Description of Artificial Sequence: Synthetic peptide
  313M32[TIGIT] vlCDR3
QQHYSTPWT

SEQ ID NO: 37587 - protein, 113 aa, Artificial Sequence
  Description of Artificial Sequence: Synthetic polypeptide
  APE5137[TIM-3] variable heavy Chain
EVQLLESGGGLVQPGGSLRLSCAAASGFTFSSYDMSWVRQAPGKGLDWVSTISGGGTYTYYQDSVKGRFTISRDNSKNTLYLQMNSLRAEDTAVYYCASMDYWGQGTTVTVSS

SEQ ID NO: 37588 - protein, 6 aa, Artificial Sequence
  Description of Artificial Sequence: Synthetic peptide
  APE5137[TIM-3] vhCDR1
SSYDMS

SEQ ID NO: 37589 - protein, 17 aa, Artificial Sequence
  Description of Artificial Sequence: Synthetic peptide
  APE5137[TIM-3] vhCDR2
TISGGGTYTYYQDSVKG

SEQ ID NO: 37590 - protein, 3 aa, Artificial Sequence
  Description of Artificial Sequence: Synthetic peptide
  APE5137[TIM-3] vhCDR3
MDY

SEQ ID NO: 37591 - protein, 107 aa, Artificial Sequence
  Description of Artificial Sequence: Synthetic polypeptide
  APE5137[TIM-3] variable light Chain
DIQMTQSPSSLSASVGDRVTITCRASQSIRRYLNWYHQKPGKAPKLLIYGASTLQSGVPSRFSGSGSGTDFTLTISSLQPEDFAVYYCQQSHSAPLTFGGGTKVEIK

SEQ ID NO: 37592 - protein, 11 aa, Artificial Sequence
  Description of Artificial Sequence: Synthetic peptide
  APE5137[TIM-3] vlCDR1
RASQSIRRYLN

SEQ ID NO: 37593 - protein, 7 aa, Artificial Sequence
  Description of Artificial Sequence: Synthetic peptide
  APE5137[TIM-3] vlCDR2
GASTLQS

SEQ ID NO: 37594 - protein, 9 aa, Artificial Sequence
  Description of Artificial Sequence: Synthetic peptide
  APE5137[TIM-3] vlCDR3
QQSHSAPLT

SEQ ID NO: 37595 - protein, 119 aa, Artificial Sequence
  Description of Artificial Sequence: Synthetic polypeptide
  APE5121[TIM-3] variable heavy Chain
EVQVLESGGGLVQPGGSLRLYCVASGFTFSGSYAMSWVRQAPGKGLEWVSAISGSGGSTYYADSVKGRFTISRDNSKNTLYLQMNSLRAEDTAVYYCAKKYYVGPADYWGQGTLVTVSS

SEQ ID NO: 37596 - protein, 6 aa, Artificial Sequence
  Description of Artificial Sequence: Synthetic peptide
  APE5121[TIM-3] vhCDR1
GSYAMS

SEQ ID NO: 37597 - protein, 17 aa, Artificial Sequence
  Description of Artificial Sequence: Synthetic peptide
  APE5121[TIM-3] vhCDR2
AISGSGGSTYYADSVKG

SEQ ID NO: 37598 - protein, 9 aa, Artificial Sequence
  Description of Artificial Sequence: Synthetic peptide
  APE5121[TIM-3] vhCDR3
KYYVGPADY

SEQ ID NO: 37599 - protein, 113 aa, Artificial Sequence
  Description of Artificial Sequence: Synthetic polypeptide
  APE5121[TIM-3] variable light Chain
DIVMTQSPDSLAVSLGERATINCKSSQSVLYSSNNKNYLAWYQHKPGQPPKLLIYWASTRESGVPDRFSGSGSGTDFTLTISSLQAEDVAVYYCQQYYSSPLTFGGGTKIEVK

SEQ ID NO: 37600 - protein, 17 aa, Artificial Sequence
  Description of Artificial Sequence: Synthetic peptide
  APE5121[TIM-3] vlCDR1
KSSQSVLYSSNNKNYLA

SEQ ID NO: 37601 - protein, 7 aa, Artificial Sequence
  Description of Artificial Sequence: Synthetic peptide
  APE5121[TIM-3] vlCDR2
WASTRES

SEQ ID NO: 37602 - protein, 9 aa, Artificial Sequence
  Description of Artificial Sequence: Synthetic peptide
  APE5121[TIM-3] vlCDR3
QQYYSSPLT

SEQ ID NO: 37603 - protein, 118 aa, Artificial Sequence
  Description of Artificial Sequence: Synthetic polypeptide
  ABTIM3-hum03[TIM-3] variable heavy Chain
QVQLVQSGAEVKKPGASVKVSCKASGYTFTSYNMHWVRQAPGQGLEWIGDIYPGQGDTSYNQKFKGRATMTADKSTSTVYMELSSLRSEDTAVYYCARVGGAFPMDYWGQGTLVTVSS

SEQ ID NO: 37604 - protein, 5 aa, Artificial Sequence
  Description of Artificial Sequence: Synthetic peptide
  ABTIM3-hum03[TIM-3] vhCDR1
SYNMH

SEQ ID NO: 37605 - protein, 17 aa, Artificial Sequence
  Description of Artificial Sequence: Synthetic peptide
  ABTIM3-hum03[TIM-3] vhCDR2
DIYPGQGDTSYNQKFKG

SEQ ID NO: 37606 - protein, 9 aa, Artificial Sequence
  Description of Artificial Sequence: Synthetic peptide
  ABTIM3-hum03[TIM-3] vhCDR3
VGGAFPMDY

SEQ ID NO: 37607 - protein, 111 aa, Artificial Sequence
  Description of Artificial Sequence: Synthetic polypeptide
  ABTIM3-hum03[TIM-3] variable light Chain
DIVLTQSPDSLAVSLGERATINCRASESVEYYGTSLMQWYQQKPGQPPKLLIYAASNVESGVPDRFSGSGSGTDFTLTISSLQAEDVAVYYCQQSRKDPSTFGGGTKVEIK

SEQ ID NO: 37608 - protein, 15 aa, Artificial Sequence
  Description of Artificial Sequence: Synthetic peptide
  ABTIM3-hum03[TIM-3] vlCDR1
RASESVEYYGTSLMQ

SEQ ID NO: 37609 - protein, 7 aa, Artificial Sequence
  Description of Artificial Sequence: Synthetic peptide
  ABTIM3-hum03[TIM-3] vlCDR2
AASNVES

SEQ ID NO: 37610 - protein, 9 aa, Artificial Sequence
  Description of Artificial Sequence: Synthetic peptide
  ABTIM3-hum03[TIM-3] vlCDR3
QQSRKDPST

SEQ ID NO: 37611 - protein, 118 aa, Artificial Sequence; identical to SEQ ID NO: 20786
  Description of Artificial Sequence: Synthetic polypeptide
  ABTIM3-hum11[TIM-3] variable heavy Chain

SEQ ID NO: 37612 - protein, 5 aa, Artificial Sequence
  Description of Artificial Sequence: Synthetic peptide
  ABTIM3-hum11[TIM-3] vhCDR1
SYNMH

SEQ ID NO: 37613 - protein, 17 aa, Artificial Sequence
  Description of Artificial Sequence: Synthetic peptide
  ABTIM3-hum11[TIM-3] vhCDR2
DIYPGNGDTSYNQKFKG

SEQ ID NO: 37614 - protein, 9 aa, Artificial Sequence
  Description of Artificial Sequence: Synthetic peptide
  ABTIM3-hum11[TIM-3] vhCDR3
VGGAFPMDY

SEQ ID NO: 37615 - protein, 111 aa, Artificial Sequence; identical to SEQ ID NO: 20791
  Description of Artificial Sequence: Synthetic polypeptide
  ABTIM3-hum11[TIM-3] variable light Chain

SEQ ID NO: 37616 - protein, 15 aa, Artificial Sequence
  Description of Artificial Sequence: Synthetic peptide
  ABTIM3-hum11[TIM-3] vlCDR1
RASESVEYYGTSLMQ

SEQ ID NO: 37617 - protein, 7 aa, Artificial Sequence
  Description of Artificial Sequence: Synthetic peptide
  ABTIM3-hum11[TIM-3] vlCDR2
AASNVES

SEQ ID NO: 37618 - protein, 9 aa, Artificial Sequence
  Description of Artificial Sequence: Synthetic peptide
  ABTIM3-hum11[TIM-3] vlCDR3
QQSRKDPST

SEQ ID NO: 37619 - protein, 118 aa, Artificial Sequence; identical to SEQ ID NO: 37603
  Description of Artificial Sequence: Synthetic polypeptide
  ABTIM3-hum21[TIM-3] variable heavy Chain

SEQ ID NO: 37620 - protein, 5 aa, Artificial Sequence
  Description of Artificial Sequence: Synthetic peptide
  ABTIM3-hum21[TIM-3] vhCDR1
SYNMH

SEQ ID NO: 37621 - protein, 17 aa, Artificial Sequence
  Description of Artificial Sequence: Synthetic peptide
  ABTIM3-hum21[TIM-3] vhCDR2
DIYPGQGDTSYNQKFKG

SEQ ID NO: 37622 - protein, 9 aa, Artificial Sequence
  Description of Artificial Sequence: Synthetic peptide
  ABTIM3-hum21[TIM-3] vhCDR3
VGGAFPMDY

SEQ ID NO: 37623 - protein, 111 aa, Artificial Sequence; identical to SEQ ID NO: 37607
  Description of Artificial Sequence: Synthetic polypeptide
  ABTIM3-hum21[TIM-3] variable light Chain

SEQ ID NO: 37624 - protein, 15 aa, Artificial Sequence
  Description of Artificial Sequence: Synthetic peptide
  ABTIM3-hum21[TIM-3] vlCDR1
RASESVEYYGTSLMQ

SEQ ID NO: 37625 - protein, 7 aa, Artificial Sequence
  Description of Artificial Sequence: Synthetic peptide
  ABTIM3-hum21[TIM-3] vlCDR2
AASNVES

SEQ ID NO: 37626 - protein, 9 aa, Artificial Sequence
  Description of Artificial Sequence: Synthetic peptide
  ABTIM3-hum21[TIM-3] vlCDR3
QQSRKDPST

SEQ ID NO: 37627 - protein, 121 aa, Artificial Sequence
  Description of Artificial Sequence: Synthetic polypeptide
  4177[TIM-3] variable heavy Chain
QVQLQESGPGLVKPSETLSLTCTVSGGSISSYYWSWIRQPPGKGLEWIGYIFHSGSTNYNPSLKSRVTISVDTSKNQFSLKLSSVTAADTAVYYCARDGEYFDMLTGFDYWGQGTLVTVSS

SEQ ID NO: 37628 - protein, 5 aa, Artificial Sequence
  Description of Artificial Sequence: Synthetic peptide
  4177[TIM-3] vhCDR1
SYYWS

SEQ ID NO: 37629 - protein, 16 aa, Artificial Sequence
  Description of Artificial Sequence: Synthetic peptide
  4177[TIM-3] vhCDR2
YIFHSGSTNYNPSLKS

SEQ ID NO: 37630 - protein, 13 aa, Artificial Sequence
  Description of Artificial Sequence: Synthetic peptide
  4177[TIM-3] vhCDR3
DGEYFDMLTGFDY

SEQ ID NO: 37631 - protein, 109 aa, Artificial Sequence
  Description of Artificial Sequence: Synthetic polypeptide
  4177[TIM-3] variable light Chain
RCDIQMTQSPSSLSASVGDRVTITCRASQGISSWLAWYQQKPEKAPKSLIYAASSLQSGVPSRFSGSGSGTDFTLTISSLQPEDFATYYCQQYNSYPRTFGQGTKVEIK

SEQ ID NO: 37632 - protein, 11 aa, Artificial Sequence
  Description of Artificial Sequence: Synthetic peptide
  4177[TIM-3] vlCDR1
RASQGISSWLA

SEQ ID NO: 37633 - protein, 7 aa, Artificial Sequence
  Description of Artificial Sequence: Synthetic peptide
  4177[TIM-3] vlCDR2
AASSLQS

SEQ ID NO: 37634 - protein, 9 aa, Artificial Sequence
  Description of Artificial Sequence: Synthetic peptide
  4177[TIM-3] vlCDR3
QQYNSYPRT

SEQ ID NO: 37635 - protein, 121 aa, Artificial Sequence
  Description of Artificial Sequence: Synthetic polypeptide
  4545[TIM-3] variable heavy Chain
QVQLQESGPGLVKPSETLSLTCTVSGGSFSRGGYYWNWIRQPPGKGLEWIGYIYYSGSTNYNPSLKSRVTISLDTSKNQFSLKLSSVTAADTAVYYCARDHYSSSWTFDYWGQGTLVTVSS

SEQ ID NO: 37636 - protein, 7 aa, Artificial Sequence
  Description of Artificial Sequence: Synthetic peptide
  4545[TIM-3] vhCDR1
RGGYYWN

SEQ ID NO: 37637 - protein, 16 aa, Artificial Sequence
  Description of Artificial Sequence: Synthetic peptide
  4545[TIM-3] vhCDR2
YIYYSGSTNYNPSLKS

SEQ ID NO: 37638 - protein, 11 aa, Artificial Sequence
  Description of Artificial Sequence: Synthetic peptide
  4545[TIM-3] vhCDR3
DHYSSSWTFDY

SEQ ID NO: 37639 - protein, 107 aa, Artificial Sequence
  Description of Artificial Sequence: Synthetic polypeptide
  4545[TIM-3] variable light Chain
EIVLTQSPATLSLSPGERATLSCRASQSVSSYLAWYQQKPGQAPRLLIYDASNRATGIPARFSGSGSGTDFTLTISSLEPEDFAVYYCQQRSNWPPTFGQGTKLEIK

SEQ ID NO: 37640 - protein, 11 aa, Artificial Sequence
  Description of Artificial Sequence: Synthetic peptide
  4545[TIM-3] vlCDR1
RASQSVSSYLA

SEQ ID NO: 37641 - protein, 7 aa, Artificial Sequence
  Description of Artificial Sequence: Synthetic peptide
  4545[TIM-3] vlCDR2
DASNRAT

SEQ ID NO: 37642 - protein, 9 aa, Artificial Sequence
  Description of Artificial Sequence: Synthetic peptide
  4545[TIM-3] vlCDR3
QQRSNWPPT

SEQ ID NO: 37643 - protein, 117 aa, Artificial Sequence; identical to SEQ ID NO: 20766
  Description of Artificial Sequence: Synthetic polypeptide
  8213[TIM-3] variable heavy Chain

SEQ ID NO: 37644 - protein, 5 aa, Artificial Sequence
  Description of Artificial Sequence: Synthetic peptide
  8213[TIM-3] vhCDR1
SYWMH

SEQ ID NO: 37645 - protein, 17 aa, Artificial Sequence
  Description of Artificial Sequence: Synthetic peptide
  8213[TIM-3] vhCDR2
EINPSNGRTNYNEKFKT

SEQ ID NO: 37646 - protein, 8 aa, Artificial Sequence
  Description of Artificial Sequence: Synthetic peptide
  8213[TIM-3] vhCDR3
GYYLYFDY

SEQ ID NO: 37647 - protein, 107 aa, Artificial Sequence; identical to SEQ ID NO: 20771
  Description of Artificial Sequence: Synthetic polypeptide
  8213[TIM-3] variable light Chain

SEQ ID NO: 37648 - protein, 11 aa, Artificial Sequence
  Description of Artificial Sequence: Synthetic peptide
  8213[TIM-3] vlCDR1
HASQGIRINIG

SEQ ID NO: 37649 - protein, 7 aa, Artificial Sequence
  Description of Artificial Sequence: Synthetic peptide
  8213[TIM-3] vlCDR2
HGTNLED

SEQ ID NO: 37650 - protein, 9 aa, Artificial Sequence
  Description of Artificial Sequence: Synthetic peptide
  8213[TIM-3] vlCDR3
VQYGQFPWT

SEQ ID NO: 37651 - protein, 117 aa, Artificial Sequence
  Description of Artificial Sequence: Synthetic polypeptide
  mAb15[TIM-3] variable heavy Chain
QVQLKESGPGLVAPSQSLSITCTVSGFSLTGYGVTWVRQPPGKGLEWLGMIWGDGNTDYNSGLKSRLNISKDNSKSQVFLKMNSLQTDDTARYYCARSYYYGPPDYWGQGTTLTVSS

SEQ ID NO: 37652 - protein, 5 aa, Artificial Sequence
  Description of Artificial Sequence: Synthetic peptide
  mAb15[TIM-3] vhCDR1
GYGVT

SEQ ID NO: 37653 - protein, 16 aa, Artificial Sequence
  Description of Artificial Sequence: Synthetic peptide
  mAb15[TIM-3] vhCDR2
MIWGDGNTDYNSGLKS

SEQ ID NO: 37654 - protein, 9 aa, Artificial Sequence
  Description of Artificial Sequence: Synthetic peptide
  mAb15[TIM-3] vhCDR3
SYYYGPPDY

SEQ ID NO: 37655 - protein, 113 aa, Artificial Sequence
  Description of Artificial Sequence: Synthetic polypeptide
  mAb15[TIM-3] variable light Chain
DIVMTQSPSSLAMSVGQKVTMSCKSSQSLLNSRSQKNYLAWYQRKPGQSPKLLLYFASTRESGVPDRFIGSGSGTDFTLTISSVQAEDLADYFCHQHYNTPYTFGGGTKLEIK

SEQ ID NO: 37656 - protein, 17 aa, Artificial Sequence
  Description of Artificial Sequence: Synthetic peptide
  mAb15[TIM-3] vlCDR1
KSSQSLLNSRSQKNYLA

SEQ ID NO: 37657 - protein, 7 aa, Artificial Sequence
  Description of Artificial Sequence: Synthetic peptide
  mAb15[TIM-3] vlCDR2
FASTRES

SEQ ID NO: 37658 - protein, 9 aa, Artificial Sequence
  Description of Artificial Sequence: Synthetic peptide
  mAb15[TIM-3] vlCDR3
HQHYNTPYT

SEQ ID NO: 37659 - protein, 121 aa, Artificial Sequence
  Description of Artificial Sequence: Synthetic polypeptide
  mAb58[TIM-3] variable heavy Chain
QIQLVQSGPELKKPGETVKISCKASGYTFTTYGMSWVKQAPGKGLKLMGWINTYSGAPTYADDFKGRFAFSLETSASAAYLQINNLKNEDTATYFCARKPPHYYVNSFDYWGQGTTLTVSS

SEQ ID NO: 37660 - protein, 5 aa, Artificial Sequence
  Description of Artificial Sequence: Synthetic peptide
  mAb58[TIM-3] vhCDR1
TYGMS

SEQ ID NO: 37661 - protein, 17 aa, Artificial Sequence
  Description of Artificial Sequence: Synthetic peptide
  mAb58[TIM-3] vhCDR2
WINTYSGAPTYADDFKG

SEQ ID NO: 37662 - protein, 12 aa, Artificial Sequence
  Description of Artificial Sequence: Synthetic peptide
  mAb58[TIM-3] vhCDR3
KPPHYYVNSFDY

SEQ ID NO: 37663 - protein, 107 aa, Artificial Sequence
  Description of Artificial Sequence: Synthetic polypeptide
  mAb58[TIM-3] variable light Chain
DIVMTQSPATLSVTPGDRVSLSCRASQSISDYLHWYQQKSHESPRLLIKYASQSISGIPSRFSGSGSGSDFTLSINSVEPEDVGVYYCQNGHSFPYTFGGGTKLEIK

SEQ ID NO: 37664 - protein, 11 aa, Artificial Sequence
  Description of Artificial Sequence: Synthetic peptide
  mAb58[TIM-3] vlCDR1
RASQSISDYLH

SEQ ID NO: 37665 - protein, 7 aa, Artificial Sequence
  Description of Artificial Sequence: Synthetic peptide
  mAb58[TIM-3] vlCDR2
YASQSIS

SEQ ID NO: 37666 - protein, 9 aa, Artificial Sequence
  Description of Artificial Sequence: Synthetic peptide
  mAb58[TIM-3] vlCDR3
QNGHSFPYT

SEQ ID NO: 37667 - protein, 120 aa, Artificial Sequence
  Description of Artificial Sequence: Synthetic polypeptide
  TIM3-0433[TIM-3] variable heavy Chain
QITLKESGPTLVKPTQTLTLTCTFSGFSLSTSGMSVGWIRQPPGKGLEWLAHIWLNDDVFFNPALKSRLTITKDTSKNQVVLTMTNMDPVDTATYYCVRANGYLYALDYWGQGTLVTVSS

SEQ ID NO: 37668 - protein, 7 aa, Artificial Sequence
  Description of Artificial Sequence: Synthetic peptide
  TIM3-0433[TIM-3] vhCDR1
TSGMSVG

SEQ ID NO: 37669 - protein, 16 aa, Artificial Sequence
  Description of Artificial Sequence: Synthetic peptide
  TIM3-0433[TIM-3] vhCDR2
HIWLNDDVFFNPALKS

SEQ ID NO: 37670 - protein, 10 aa, Artificial Sequence
  Description of Artificial Sequence: Synthetic peptide
  TIM3-0433[TIM-3] vhCDR3
ANGYLYALDY

SEQ ID NO: 37671 - protein, 106 aa, Artificial Sequence
  Description of Artificial Sequence: Synthetic polypeptide
  TIM3-0433[TIM-3] variable light Chain
ETTLTQSPAFMSATPGDKVNIACSASSSVSYTQWYQQKPGEAPKLWIYDAFKLAPGIPPRFSGSGYGTDFTLTINNIESEDAAYYFCHQWSSYPWTFGQGTKLEIK

SEQ ID NO: 37672 - protein, 10 aa, Artificial Sequence
  Description of Artificial Sequence: Synthetic peptide
  TIM3-0433[TIM-3] vlCDR1
SASSSVSYTQ

SEQ ID NO: 37673 - protein, 7 aa, Artificial Sequence
  Description of Artificial Sequence: Synthetic peptide
  TIM3-0433[TIM-3] vlCDR2
DAFKLAP

SEQ ID NO: 37674 - protein, 9 aa, Artificial Sequence
  Description of Artificial Sequence: Synthetic peptide
  TIM3-0433[TIM-3] vlCDR3
HQWSSYPWT

SEQ ID NO: 37675 - protein, 120 aa, Artificial Sequence; identical to SEQ ID NO: 37667
  Description of Artificial Sequence: Synthetic polypeptide
  TIM3-0434[TIM-3] variable heavy Chain

SEQ ID NO: 37676 - protein, 7 aa, Artificial Sequence
  Description of Artificial Sequence: Synthetic peptide
  TIM3-0434[TIM-3] vhCDR1
TSGMSVG

SEQ ID NO: 37677 - protein, 16 aa, Artificial Sequence
  Description of Artificial Sequence: Synthetic peptide
  TIM3-0434[TIM-3] vhCDR2
HIWLNDDVFFNPALKS

SEQ ID NO: 37678 - protein, 10 aa, Artificial Sequence
  Description of Artificial Sequence: Synthetic peptide
  TIM3-0434[TIM-3] vhCDR3
ANGYLYALDY

SEQ ID NO: 37679 - protein, 106 aa, Artificial Sequence
  Description of Artificial Sequence: Synthetic polypeptide
  TIM3-0434[TIM-3] variable light Chain
DIQLTQSPSFLSASVGDRVTITCSASSSVSYTQWYQQKPGKAPKLWIYDAFKLAPGVPSRFSGSGSGTEFTLTISSLQPEDFATYFCHQWSSYPWTFGQGTKLEIK

SEQ ID NO: 37680 - protein, 10 aa, Artificial Sequence
  Description of Artificial Sequence: Synthetic peptide
  TIM3-0434[TIM-3] vlCDR1
SASSSVSYTQ

SEQ ID NO: 37681 - protein, 7 aa, Artificial Sequence
  Description of Artificial Sequence: Synthetic peptide
  TIM3-0434[TIM-3] vlCDR2
DAFKLAP

SEQ ID NO: 37682 - protein, 9 aa, Artificial Sequence
  Description of Artificial Sequence: Synthetic peptide
  TIM3-0434[TIM-3] vlCDR3
HQWSSYPWT

SEQ ID NO: 37683 - protein, 119 aa, Artificial Sequence
  Description of Artificial Sequence: Synthetic polypeptide
  TIM3-0438[TIM-3] variable heavy Chain
EVQLVESGGGLVQPGGSLRLSCAASGFNIKTTYMHWVRQAPGKGLEWVGRIDPADDNTKYAPKFQGKATISADTSKNTAYLQMNSLRAEDTAVYYCVRDFGYVAWFAYWGQGTLVTVSS

SEQ ID NO: 37684 - protein, 5 aa, Artificial Sequence
  Description of Artificial Sequence: Synthetic peptide
  TIM3-0438[TIM-3] vhCDR1
TTYMH

SEQ ID NO: 37685 - protein, 17 aa, Artificial Sequence
  Description of Artificial Sequence: Synthetic peptide
  TIM3-0438[TIM-3] vhCDR2
RIDPADDNTKYAPKFQG

SEQ ID NO: 37686 - protein, 10 aa, Artificial Sequence
  Description of Artificial Sequence: Synthetic peptide
  TIM3-0438[TIM-3] vhCDR3
DFGYVAWFAY

SEQ ID NO: 37687 - protein, 107 aa, Artificial Sequence
  Description of Artificial Sequence: Synthetic polypeptide
  TIM3-0438[TIM-3] variable light Chain
DIVMTQSPLSLPVTPGEPASISCRASQSVDNYVAWYLQKPGQSPQLLIYYASNRYIGVPDRFSGSGSGTDFTLKISRVEAEDVGVYYCQQHYSSPYTFGQGTKVEIK

SEQ ID NO: 37688 - protein, 11 aa, Artificial Sequence
  Description of Artificial Sequence: Synthetic peptide
  TIM3-0438[TIM-3] vlCDR1
RASQSVDNYVA

SEQ ID NO: 37689 - protein, 7 aa, Artificial Sequence
  Description of Artificial Sequence: Synthetic peptide
  TIM3-0438[TIM-3] vlCDR2
YASNRYI

SEQ ID NO: 37690 - protein, 9 aa, Artificial Sequence
  Description of Artificial Sequence: Synthetic peptide
  TIM3-0438[TIM-3] vlCDR3
QQHYSSPYT

SEQ ID NO: 37691 - protein, 119 aa, Artificial Sequence
  Description of Artificial Sequence: Synthetic polypeptide
  TIM3-0443[TIM-3] variable heavy Chain
EVQLVESGGGLVQPGGSLRLSCAASGFNIKTTYMHWVRQAPGKGLEWVGRIDPADDNTKYAPKFQGKATISADTSKNTAYLQMNSLRAEDTAVYYCVRDFGYVAWFAYWGQGTLVTFSS

SEQ ID NO: 37692 - protein, 5 aa, Artificial Sequence
  Description of Artificial Sequence: Synthetic peptide
  TIM3-0443[TIM-3] vhCDR1
TTYMH

SEQ ID NO: 37693 - protein, 17 aa, Artificial Sequence
  Description of Artificial Sequence: Synthetic peptide
  TIM3-0443[TIM-3] vhCDR2
RIDPADDNTKYAPKFQG

SEQ ID NO: 37694 - protein, 10 aa, Artificial Sequence
  Description of Artificial Sequence: Synthetic peptide
  TIM3-0443[TIM-3] vhCDR3
DFGYVAWFAY

SEQ ID NO: 37695 - protein, 107 aa, Artificial Sequence; identical to SEQ ID NO: 37687
  Description of Artificial Sequence: Synthetic polypeptide
  TIM3-0443[TIM-3] variable light Chain

SEQ ID NO: 37696 - protein, 11 aa, Artificial Sequence
  Description of Artificial Sequence: Synthetic peptide
  TIM3-0443[TIM-3] vlCDR1
RASQSVDNYVA

SEQ ID NO: 37697 - protein, 7 aa, Artificial Sequence
  Description of Artificial Sequence: Synthetic peptide
  TIM3-0443[TIM-3] vlCDR2
YASNRYI

SEQ ID NO: 37698 - protein, 9 aa, Artificial Sequence
  Description of Artificial Sequence: Synthetic peptide
  TIM3-0443[TIM-3] vlCDR3
QQHYSSPYT

SEQ ID NO: 37699 - protein, 15 aa, Artificial Sequence
  Description of Artificial Sequence: Synthetic peptide
GGGGSGGGGSGGGGS

SEQ ID NO: 37700 - protein, 18 aa, Artificial Sequence
  Description of Artificial Sequence: Synthetic peptide
GSTSGSGKPGSGEGSTKG

SEQ ID NO: 37701 - protein, 14 aa, Artificial Sequence
  Description of Artificial Sequence: Synthetic peptide
IRPRAIGGSKPRVA

SEQ ID NO: 37702 - protein, 15 aa, Artificial Sequence
  Description of Artificial Sequence: Synthetic peptide
GKGGSGKGGSGKGGS

SEQ ID NO: 37703 - protein, 15 aa, Artificial Sequence
  Description of Artificial Sequence: Synthetic peptide
GGKGSGGKGSGGKGS

SEQ ID NO: 37704 - protein, 15 aa, Artificial Sequence
  Description of Artificial Sequence: Synthetic peptide
GGGKSGGGKSGGGKS

SEQ ID NO: 37705 - protein, 15 aa, Artificial Sequence
  Description of Artificial Sequence: Synthetic peptide
GKGKSGKGKSGKGKS

SEQ ID NO: 37706 - protein, 15 aa, Artificial Sequence
  Description of Artificial Sequence: Synthetic peptide
GGGKSGGKGSGKGGS

SEQ ID NO: 37707 - protein, 15 aa, Artificial Sequence
  Description of Artificial Sequence: Synthetic peptide
GKPGSGKPGSGKPGS

SEQ ID NO: 37708 - protein, 20 aa, Artificial Sequence
  Description of Artificial Sequence: Synthetic peptide
GKPGSGKPGSGKPGSGKPGS

SEQ ID NO: 37709 - protein, 20 aa, Artificial Sequence
  Description of Artificial Sequence: Synthetic peptide
GKGKSGKGKSGKGKSGKGKS

SEQ ID NO: 37710 - protein, 20 aa, Artificial Sequence
  Description of Artificial Sequence: Synthetic peptide
GGGGSGGGGSGGGGSGGGGS

SEQ ID NO: 37711 - protein, 14 aa, Artificial Sequence
  Description of Artificial Sequence: Synthetic peptide
STAGDTHLGGEDFD

SEQ ID NO: 37712 - protein, 15 aa, Artificial Sequence
  Description of Artificial Sequence: Synthetic peptide
GEGGSGEGGSGEGGS

SEQ ID NO: 37713 - protein, 15 aa, Artificial Sequence
  Description of Artificial Sequence: Synthetic peptide
GGEGSGGEGSGGEGS

SEQ ID NO: 37714 - protein, 15 aa, Artificial Sequence
  Description of Artificial Sequence: Synthetic peptide
GGGESGGGESGGGES

SEQ ID NO: 37715 - protein, 15 aa, Artificial Sequence
  Description of Artificial Sequence: Synthetic peptide
GEGESGEGESGEGES

SEQ ID NO: 37716 - protein, 15 aa, Artificial Sequence
  Description of Artificial Sequence: Synthetic peptide
GGGESGGEGSGEGGS

SEQ ID NO: 37717 - protein, 20 aa, Artificial Sequence
  Description of Artificial Sequence: Synthetic peptide
GEGESGEGESGEGESGEGES

SEQ ID NO: 37718 - protein, 15 aa, Artificial Sequence
  Description of Artificial Sequence: Synthetic peptide
GGGGSGGGGSGGGGS

SEQ ID NO: 37719 - protein, 20 aa, Artificial Sequence
  Description of Artificial Sequence: Synthetic peptide
GGGGSGGGGSGGGGSGGGGS

SEQ ID NO: 37720 - protein, 18 aa, Artificial Sequence
  Description of Artificial Sequence: Synthetic peptide
GSTSGSGKPGSGEGSTKG

SEQ ID NO: 37721 - protein, 19 aa, Artificial Sequence
  Description of Artificial Sequence: Synthetic peptide
PRGASKSGSASQTGSAPGS

SEQ ID NO: 37722 - protein, 19 aa, Artificial Sequence
  Description of Artificial Sequence: Synthetic peptide
GTAAAGAGAAGGAAAGAAG

SEQ ID NO: 37723 - protein, 19 aa, Artificial Sequence
  Description of Artificial Sequence: Synthetic peptide
GTSGSSGSGSGGSGSGGGG

SEQ ID NO: 37724 - protein, 20 aa, Artificial Sequence
  Description of Artificial Sequence: Synthetic peptide
GKPGSGKPGSGKPGSGKPGS

SEQ ID NO: 37725 - protein, 329 aa, Artificial Sequence
  Description of Artificial Sequence: Synthetic polypeptide
ASTKGPSVFPLAPSSKSTSGGTAALGCLVKDYFPEPVTVSWNSGALTSGVHTFPAVLQSSGLYSLSSVVTVPSSSLGTQTYICNVNHKPSDTKVDKKVEPKSCDKTHTCPPCPAPPVAGPSVFLFPPKPKDTLMISRTPEVTCVVVDVKHEDPEVKFNWYVDGVEVHNAKTKPREEEYNSTYRVVSVLTVLHQDWLNGKEYKCKVSNKALPAPIEKTISKAKGQPREPQVYTLPPSREEMTKNQVSLTCDVSGFYPSDIAVEWESDGQPENNYKTTPPVLDSDGSFFLYSKLTVDKSRWEQGDVFSCSVMHEALHNHYTQKSLSLSPGK

SEQ ID NO: 37726 - protein, 231 aa, Artificial Sequence; identical to SEQ ID NO: 21532
  Description of Artificial Sequence: Synthetic polypeptide

SEQ ID NO: 37727 - protein, 107 aa, Artificial Sequence [sequence omitted]

SEQ ID NO: 37728 - protein, 329 aa, Artificial Sequence; identical to SEQ ID NO: 37725
  Description of Artificial Sequence: Synthetic polypeptide

SEQ ID NO: 37729 - protein, 231 aa, Artificial Sequence
  Description of Artificial Sequence: Synthetic polypeptide
EPKSSDKTHTCPPCPAPPVAGPSVFLFPPKPKDTLMISRTPEVTCVVVDVKHEDPEVKFNWYVDGVEVHNAKTKPREEQYNSTYRVVSVLTVLHQDWLNGKEYKCKVSNKALPAPIEKTISKAKGQPREPQVYTLPPSREEMTKNQVKLTCLVKGFYPSDIAVEWESNGQPENNYKTTPPVLDSDGSFFLYSKLTVDKSRWQQGNVFSCSVMHEALHNHYTQKSLSLSPGK

SEQ ID NO: 37730 - protein, 107 aa, Artificial Sequence [sequence omitted]

SEQ ID NO: 37731 - protein, 329 aa, Artificial Sequence
  Description of Artificial Sequence: Synthetic polypeptide
ASTKGPSVFPLAPSSKSTSGGTAALGCLVKDYFPEPVTVSWNSGALTSGVHTFPAVLQSSGLYSLSSVVTVPSSSLGTQTYICNVNHKPSDTKVDKKVEPKSCDKTHTCPPCPAPPVAGPSVFLFPPKPKDTLMISRTPEVTCVVVDVKHEDPEVKFNWYVDGVEVHNAKTKPREEEYNSTYRVVSVLTVLHQDWLNGKEYKCKVSNKALPAPIEKTISKAKGQPREPQVYTLPPSREEMTKNQVSLTCEVSGFYPSDIAVEWESDGQPENNYKTTPPVLDSDGSFFLYSKLTVDKSRWEQGDVFSCSVMHEALHNHYTQKSLSLSPGK

SEQ ID NO: 37732 - protein, 231 aa, Artificial Sequence; identical to SEQ ID NO: 37729
  Description of Artificial Sequence: Synthetic polypeptide

SEQ ID NO: 37733 - protein, 107 aa, Artificial Sequence [sequence omitted]

SEQ ID NO: 37734 - protein, 330 aa, Artificial Sequence
  Description of Artificial Sequence: Synthetic polypeptide
ASTKGPSVFPLAPSSKSTSGGTAALGCLVKDYFPEPVTVSWNSGALTSGVHTFPAVLQSSGLYSLSSVVTVPSSSLGTQTYICNVNHKPSDTKVDKKVEPKSCDKTHTCPPCPAPPVAGPSVFLFPPKPKDTLMISRTPEVTCVVVDVKHEDPEVKFNWYVDGVEVHNAKTKPREEEYNSTYRVVSVLTVLHQDWLNGKEYKCKVSNKALPAPIEKTISKAKGQPREPQVYTLPPSREEMTENEVSLTCLVKSGFYPSDIAVEWESDGQPENNYKTTPPVLDSDGSFFLYSKLEVDKSRWEQGDVFSCSVMHEALHNHYTQKSLSLSPGK

SEQ ID NO: 37735 - protein, 231 aa, Artificial Sequence
  Description of Artificial Sequence: Synthetic polypeptide
EPKSSDKTHTCPPCPAPPVAGPSVFLFPPKPKDTLMISRTPEVTCVVVDVKHEDPEVKFNWYVDGVEVHNAKTKPREEQYNSTYRVVSVLTVLHQDWLNGKEYKCKVSNKALPAPIEKTISKAKGQPREPQVYTLPPSREEMTKNQVSLTCLVKGFYPSDIAVEWESNGQPENNYKTTPPVLDSKGSFFLYSKLTVDKSRWQQGNVFSCSVMHEALHNHYTQKSLSLSPGK

SEQ ID NO: 37736 - protein, 107 aa, Artificial Sequence [sequence omitted]

SEQ ID NO: 37737 - protein, 329 aa, Artificial Sequence; identical to SEQ ID NO: 37725
  Description of Artificial Sequence: Synthetic polypeptide

SEQ ID NO: 37738 - protein, 329 aa, Artificial Sequence
  Description of Artificial Sequence: Synthetic polypeptide
ASTKGPSVFPLAPSSKSTSGGTAALGCLVKDYFPEPVTVSWNSGALTSGVHTFPAVLQSSGLYSLSSVVTVPSSSLGTQTYICNVNHKPSDTKVDKKVEPKSSDKTHTCPPCPAPPVAGPSVFLFPPKPKDTLMISRTPEVTCVVVDVKHEDPEVKFNWYVDGVEVHNAKTKPREEQYNSTYRVVSVLTVLHQDWLNGKEYKCKVSNKALPAPIEKTISKAKGQPREPQVYTLPPSREQMTKNQVKLTCLVKGFYPSDIAVEWESNGQPENNYKTTPPVLDSDGSFFLYSKLTVDKSRWQQGNVFSCSVMHEALHNHYTQKSLSLSPGK

SEQ ID NO: 37739 - protein, 107 aa, Artificial Sequence [sequence omitted]

SEQ ID NO: 37740 - protein, 329 aa, Artificial Sequence; identical to SEQ ID NO: 37725
  Description of Artificial Sequence: Synthetic polypeptide

SEQ ID NO: 37741 - protein, 231 aa, Artificial Sequence; identical to SEQ ID NO: 21532
  Description of Artificial Sequence: Synthetic polypeptide

SEQ ID NO: 37742 - protein, 107 aa, Artificial Sequence [sequence omitted]

SEQ ID NO: 37743 - protein, 329 aa, Artificial Sequence; identical to SEQ ID NO: 37725
  Description of Artificial Sequence: Synthetic polypeptide

SEQ ID NO: 37744 - protein, 231 aa, Artificial Sequence; identical to SEQ ID NO: 37729
  Description of Artificial Sequence: Synthetic polypeptide

SEQ ID NO: 37745 - protein, 107 aa, Artificial Sequence [sequence omitted]

SEQ ID NO: 37746 - protein, 329 aa, Artificial Sequence; identical to SEQ ID NO: 37731
  Description of Artificial Sequence: Synthetic polypeptide

SEQ ID NO: 37747 - protein, 231 aa, Artificial Sequence; identical to SEQ ID NO: 37729
  Description of Artificial Sequence: Synthetic polypeptide

SEQ ID NO: 37748 - protein, 107 aa, Artificial Sequence [sequence omitted]

SEQ ID NO: 37749 - protein, 330 aa, Artificial Sequence; identical to SEQ ID NO: 37734
  Description of Artificial Sequence: Synthetic polypeptide

SEQ ID NO: 37750 - protein, 231 aa, Artificial Sequence; identical to SEQ ID NO: 37735
  Description of Artificial Sequence: Synthetic polypeptide

SEQ ID NO: 37751 - protein, 107 aa, Artificial Sequence [sequence omitted]

SEQ ID NO: 37752 - protein, 329 aa, Artificial Sequence; identical to SEQ ID NO: 37725
  Description of Artificial Sequence: Synthetic polypeptide

SEQ ID NO: 37753 - protein, 329 aa, Artificial Sequence; identical to SEQ ID NO: 37738
  Description of Artificial Sequence: Synthetic polypeptide

SEQ ID NO: 37754 - protein, 107 aa, Artificial Sequence [sequence omitted]

SEQ ID NO: 37755 - protein, 20 aa, Artificial Sequence
  Description of Artificial Sequence: Synthetic peptide
GKPGSGKPGSGKPGSGKPGS

SEQ ID NO: 37756 - protein, 5 aa, Artificial Sequence
  Description of Artificial Sequence: Synthetic peptide
GSGGS

SEQ ID NO: 37757 - protein, 5 aa, Artificial Sequence
  Description of Artificial Sequence: Synthetic peptide
GGGGS

SEQ ID NO: 37758 - protein, 4 aa, Artificial Sequence
  Description of Artificial Sequence: Synthetic peptide
GGGS
